United States Patent Application Publication US 2025/0215492 A1 - sequence listing, part 8

SEQ ID NO: 121448 - DNA, 120 bp, synthetic construct
  source 1..120: mol_type = other DNA
ctggggaaaaagcagacaacataaaaaggccatttctcgatggagatatgcttctgtaatttttaaatgtaacttttggttgctaatgaggcctcaagaaatcagatataactcttacta

SEQ ID NO: 121449 - DNA, 120 bp, synthetic construct
  source 1..120: mol_type = other DNA
acccataacaagtaaagagattgaatcggtaattaaaaatctttcaggccgggagcggtggctcacgcctgtaatcccagcactttgggaggccaaggcgggtggatcacgaggtcagga

SEQ ID NO: 121450 - DNA, 120 bp, synthetic construct
  source 1..120: mol_type = other DNA
accaggcaactgctcaacagaagctgctcacacggacggacagatagacagatgggaaatgcacgactacatgaaggaaaatgtaaacccatcttaggagacaggaaaaagcttattatt

SEQ ID NO: 121451 - DNA, 120 bp, synthetic construct
  source 1..120: mol_type = other DNA
gttcaacttttccagtcacagaagatatttacagcaaagttaattctccccttcataaaatgctttaagccctgccctaatggcatttaatacattttattacttgtggatagctggaaa

SEQ ID NO: 121452 - DNA, 120 bp, synthetic construct
  source 1..120: mol_type = other DNA
attgcagatcaaaattggtgacatacaactaaatgcatgcttgagggcatttacgcctttaaatgtgtatattagggggaaaaagctaaaaaagaaaagaaacaccaaatcaatagaagt

SEQ ID NO: 121453 - DNA, 120 bp, synthetic construct
  source 1..120: mol_type = other DNA
gctcattgtcagtttcctgtgccctgctgtcccacagctgaagcaacaacaggatggcagacaacatttggctaaaggagaaaacacatttattcctagtaaaaacagattaactttttt

SEQ ID NO: 121454 - DNA, 120 bp, synthetic construct
  source 1..120: mol_type = other DNA
aggcggagcttgcggtaagccgagatggcaccactgcactctagcctgggcaacagagcaagactccatctgaaaaaaaaaaagaaaagaaaagaaaagaaaagaaaccaatatatcaaa

SEQ ID NO: 121455 - DNA, 120 bp, synthetic construct
  source 1..120: mol_type = other DNA
ataaataatgagtatctaaaaatccctaaggaaacagttcctctgtttacaacacttctgacgccaaatgtatggacttttgcaccaagcaattctccagttctttgcgacacccagcta

SEQ ID NO: 121456 - DNA, 120 bp, synthetic construct
  source 1..120: mol_type = other DNA
gctgggtctggaaggctggagcagggcgtggccccactctaggaaggaactaggaaacgcatcctgggtgaagcaagagcagagtcccgttctgcaacagatgagcctttatcctgatct

SEQ ID NO: 121457 - DNA, 120 bp, synthetic construct
  source 1..120: mol_type = other DNA
acctttaagtgagtcattacgcatagagtttaattagaagagctcttgacatacagcaaatactaaaaacattcagtagcatccacagtagaaaacgcagggccgggcgcggtggcacac

SEQ ID NO: 121458 - DNA, 120 bp, synthetic construct
  source 1..120: mol_type = other DNA
taaagacatggagtagaagatacacacgttgagtaggtttaacaggcctgagcaaaagatgcatataatgaaacgtcacaagaacagactagaaattcctctaagcctgttgcgagagcc

SEQ ID NO: 121459 - DNA, 120 bp, synthetic construct
  source 1..120: mol_type = other DNA
ccttttagaaattaaattttggacatgcccatgtgtcctctgagcctgtcctttctgtcagaagtcacgcagagacccaaatgtcaaaaagggacacactcttttgttgatgcacaagat

SEQ ID NO: 121460 - DNA, 120 bp, synthetic construct
  source 1..120: mol_type = other DNA
ttttaataacccaatctcaacaaacatagctagagtacaaatgatgagcacaaaaatccatctcatctgtagctcagactagtatttcaaatgtaatttctctattagtaatttagtctg

SEQ ID NO: 121461 - DNA, 120 bp, synthetic construct
  source 1..120: mol_type = other DNA
atgagcagcttctacattggcctgtgttcccgcctccactgcaacattttctcctaccactactctggctacggtgccagctcgggcaggccctccgagacgaacctctacgccgacatc

SEQ ID NO: 121462 - DNA, 120 bp, synthetic construct
  source 1..120: mol_type = other DNA
attttcttcaaaacagactagttcataactgaaataggcattgtttctagaaaacagtcactccaactgatcccctcatttaatcatttttgtactccctgaatctatcataatacctgg

SEQ ID NO: 121463 - DNA, 120 bp, synthetic construct
  source 1..120: mol_type = other DNA
agtcacctaaataaaaaatataaaagttctacattttaacgtcctttcaacattttatgaccagaaaacccagcagataaacagctcaggtcttaatgggaaatgataacataagatcag

SEQ ID NO: 121464 - DNA, 120 bp, synthetic construct
  source 1..120: mol_type = other DNA
ataaaacatagattaaattgtatcagcttctgcttacagtttttatttatttattaaatttgtgatgtatttgtatttatttatttattttgagacagagtcttgctctgtcacccaggc

SEQ ID NO: 121465 - DNA, 120 bp, synthetic construct
  source 1..120: mol_type = other DNA
acccaaccaaaaattacttgttttttaatactacttaacaatatgctacaaagagttaacatatatctcactttgttaccagttcttgctgaagtatccgtatgtctgtacccctatggt

SEQ ID NO: 121466 - DNA, 120 bp, synthetic construct
  source 1..120: mol_type = other DNA
gacccagcaatcccattactgggcatatacccaaaggattataaatcattctacacattctcacgtatgtttattgtggcactattcacaatagcaaagacttggaaccaacccaaatgc

SEQ ID NO: 121467 - DNA, 120 bp, synthetic construct
  source 1..120: mol_type = other DNA
gaatctgggatctggagaagttaagtaacataagttactcaagtaaggccacacagtgtatataaagtgtgctgcaaggagttaaacccagggaaagcgcactccaaaatagaaccatca

SEQ ID NO: 121468 - DNA, 120 bp, synthetic construct
  source 1..120: mol_type = other DNA
tacattagaattatagctgatcaaaaatctcattccaagctgttatattgttgactatctcacaatcactcttcttatgaatcatgtaaataagggaaaatactgcaaagtagacacaca

SEQ ID NO: 121469 - DNA, 120 bp, synthetic construct
  source 1..120: mol_type = other DNA
cttaatatatttaccatagacaaattttcattaagccacagtataaataaaaaagacccacaccagtatttttaacatgacgtggatgaagtggttctgtcatcattaaatgagtacttt

SEQ ID NO: 121470 - DNA, 120 bp, synthetic construct
  source 1..120: mol_type = other DNA
ctaagattaccaacatatcatgcaaatgaaacacccaggtacttcctaccaacacatgatataataaaatccagaagaacttctgaattagagtgtagtagttgcctaggaccatcatac

SEQ ID NO: 121471 - DNA, 120 bp, synthetic construct
  source 1..120: mol_type = other DNA
tttgtctttggtgacagtaacgtaaatttagagctggaaaggaccttagaggtcatctagtcccactcaagtatcttttaaaacaaaataaagaagtatgttggcctggtgcggtggctc

SEQ ID NO: 121472 - DNA, 120 bp, synthetic construct
  source 1..120: mol_type = other DNA
aaatgttaatcaccaagacaatggggaaaatgtctccaggacatgaaagaccttcacatcttcacagcagctctttccaccacaggctcaaaagcctagtatggaaaaatcatttcctgg

SEQ ID NO: 121473 - DNA, 120 bp, synthetic construct
  source 1..120: mol_type = other DNA
ggacaaaagctacagcccagcaggagggcagggtggccatgagggttgtaaaagtgatgccaacagcatttgtgggggattggctgtgggtgtgaaacagcagcagcggaacaattccca

SEQ ID NO: 121474 - DNA, 120 bp, synthetic construct
  source 1..120: mol_type = other DNA
aattatccaacccgtgacaattcggagagaacttacaatttagttattttgtccagtcaactttgaagctgaacagagctggggtaagggaaaacacgaattacaggaatatgcgggggt

SEQ ID NO: 121475 - DNA, 120 bp, synthetic construct
  source 1..120: mol_type = other DNA
tgccctccatccccagggctcctgctcagcacttcttactttcccaggacaagcctggctccaacagacatctctagatgctgtgtttctctttgtggtgagcaaagaaacagaatgagt

SEQ ID NO: 121476 - DNA, 120 bp, synthetic construct
  source 1..120: mol_type = other DNA
tggaacttagtcatgccattgtagatcgtttcttttggaatcactgggtgatgagaaaccccaggctggagagctggacaccgtggagtccctgtgggagaactgttattagggtggcct

SEQ ID NO: 121477 - DNA, 120 bp, synthetic construct
  source 1..120: mol_type = other DNA
ctcgaggagcggcccagacacctccctccgtgcccgagttcactcctggccgagttgcatccttgagcccgagtcgccccgttggaggcttcccctccctcctgcactcgctgatgcggc

SEQ ID NO: 121478 - DNA, 120 bp, synthetic construct
  source 1..120: mol_type = other DNA
atgatgagatggaaagatgaaacgaaatgatgagatgaaatgatgagatgaaatgatgaagtgaggagatgaagtgaaatgatgaaatgaaatgatgaaatgatgaagtgaaatgatgac

SEQ ID NO: 121479 - DNA, 120 bp, synthetic construct
  source 1..120: mol_type = other DNA
atgacgagatgaaaagacaaaatgaaatgaaatgatgaaatgacgagatgaaaacatgaaatgatgggatgtaatgaaatgatgagatgaaatcatgagatgaaatgatgagatgaagtg

SEQ ID NO: 121480 - DNA, 120 bp, synthetic construct
  source 1..120: mol_type = other DNA
cgctctctcttccatgctggagtgcagtggcgtgatctcagctcactgcaacctccacctcctgggttcaggcaattcttgtgccttagccaccagagtagctgggattacaggtgtgtg

SEQ ID NO: 121481 - DNA, 120 bp, synthetic construct
  source 1..120: mol_type = other DNA
aagcctcttaggctctctgagcctcagtctcctcggtaataaacatggggggctaaaagggaaggctcggggctgggtgcagaatcatgcagcactcgccactttcctggcagatgctga

SEQ ID NO: 121482 - DNA, 120 bp, synthetic construct
  source 1..120: mol_type = other DNA
ttgcgaaaattttctcccatgttgtaggttgcctgttcactctgatggtagtttcttttgctgtgcagaagctctttagtttaattagatcccatttgtcaattttgtcttttgttgcca

SEQ ID NO: 121483 - DNA, 120 bp, synthetic construct
  source 1..120: mol_type = other DNA
gctatctatgacaaacccacagccaatatcatactgaatgggcaaaaactggaagcattccctttgaaaaccggcacaagacagggatgccctctctcaccgctcctattcaacatagtg

SEQ ID NO: 121484 - DNA, 120 bp, synthetic construct
  source 1..120: mol_type = other DNA
gggtgtcaattttggatctttcctgctttctcttgtaggcatttagtgctataaatttccctctacacactgctttgaatgcgtcccagagattctggtatgtggtgtctttgttctcgt

SEQ ID NO: 121485 - DNA, 120 bp, synthetic construct
  source 1..120: mol_type = other DNA
tggcatgattttgcagcggctggtaccggttgttcctttccatgtttagcgcttccttcaggagctcttttagggcaggcctggtggtgacaaaatctctcaacatttgcttgtctataa

SEQ ID NO: 121486 - DNA, 120 bp, synthetic construct; identical to SEQ ID NO: 71049
  source 1..120: mol_type = other DNA

SEQ ID NO: 121487 - DNA, 120 bp, synthetic construct
  source 1..120: mol_type = other DNA
aatagatgcagaaaaggccttcaataaaattcaacaccgattcatactaaaaccgctcattaactaggtattgatggaatgtatctcaaaataataagagctgtttatgagaaatgcata

SEQ ID NO: 121488 - DNA, 120 bp, synthetic construct
  source 1..120: mol_type = other DNA
agtgaaatggaatggaatggaatggagtggagtggagtggagtggagtggaatggaatggaatggaatggaatggaatggaatggaatggaattgaaatgaatcgaatcaaatcgaacag

SEQ ID NO: 121489 - DNA, 120 bp, synthetic construct
  source 1..120: mol_type = other DNA
gtgagttgagtgcacacagcacaaataagtttctcagattgtttctgtctagattttatgtgaagatattcccttttccaccataggccccaaagcgcaccaaatatccacttgcagatt

SEQ ID NO: 121490 - DNA, 120 bp, synthetic construct
  source 1..120: mol_type = other DNA
tttcccaacataggcatcaaatcacctcaaatattcacttgcagattctacaaaaagaggatttcaaaactggtcaatcaaaagaaagttggaactcagtgagatgaatgcacacatcac

SEQ ID NO: 121491 - DNA, 120 bp, synthetic construct
  source 1..120: mol_type = other DNA
gtgtttaactcacagagtttaacctttcttttcataaaacattctggaaacactctgtttgtaaagtctgcaagtgcatatttagacctcttagatgccttcgttggaaacgggatttct

SEQ ID NO: 121492 - DNA, 120 bp, synthetic construct
  source 1..120: mol_type = other DNA
caagtggagatttcaagcgctttgatgccaatggtagaaaaggaaatatcttcgtataaaaacaagacaaactcgttcccagaaactgcgtagtgatgtgtgtgtttaactcacagactt

SEQ ID NO: 121493 - DNA, 120 bp, synthetic construct
  source 1..120: mol_type = other DNA
tttcttttcatacagaactctggaaaccctctgtttgtaaagtctgcaagtgtatatttggacctcttagatgccttcgttggaaatgggatttcgtcatataatggtagagggaagaat

SEQ ID NO: 121494 - DNA, 120 bp, synthetic construct
  source 1..120: mol_type = other DNA
tgattccattctattccattaaatgattgctttccattccattcaacgattttcccattagggtaaattcaacgattattttcaataccatgcgatgatgattccttttgagtccattca

SEQ ID NO: 121495 - DNA, 120 bp, synthetic construct
  source 1..120: mol_type = other DNA
gattccattcgataatgattccattcgagtccattctatgtttgcattcgagccaatttgataattccatttcagtccaaccaatgattccattcgagtccattcgatcattccatttga

SEQ ID NO: 121496 - DNA, 120 bp, synthetic construct
  source 1..120: mol_type = other DNA
ccattcgagtccattcgatgattcctttcgattccattcgaagatgattgcattcgagtccatggattattccattccattccactaaatgattccatttgagtctattcgatgattctc

SEQ ID NO: 121497 - DNA, 120 bp, synthetic construct
  source 1..120: mol_type = other DNA
ctattgtacagtgcggttataacctgagtcagtatctcaagatttgatcctcattatcatcatctgtgggcctatttgttttacaaatgtattctctttttccatgcctgtcacatctcc

SEQ ID NO: 121498 - DNA, 120 bp, synthetic construct
  source 1..120: mol_type = other DNA
ctaatatttataagagccacttggatttatatatattgttgaacctgaaaaatatttattatatacatgcttaaaatatacacagaaacaaatagtaattgcactaggcatttgaaactg

SEQ ID NO: 121499 - DNA, 120 bp, synthetic construct
  source 1..120: mol_type = other DNA
catgcaacttaatggtaaaggatgctttcctgccatggtcagagataagactagtatatataatttgacctcttctagtcaacactgtgctaaagattttatgcagggcaaatcggcaac

SEQ ID NO: 121500 - DNA, 120 bp, synthetic construct
  source 1..120: mol_type = other DNA
cccaaagcatacaaaaatattaactcaaatgaattaaagacactcatgcgagagctagaataaagtgaatgggaaattcttcagtattttggatctagcaaaggaatagctgtaacacca

SEQ ID NO: 121501 - DNA, 120 bp, synthetic construct
  source 1..120: mol_type = other DNA
aggttaacagctagagaaggtggggtttctttttgaagtgatgaaaatgctctaaaattctttgtgatgatggcgccacttatctgtgcatatactaaaagccactgacttgtagacttg

SEQ ID NO: 121502 - DNA, 120 bp, synthetic construct
  source 1..120: mol_type = other DNA
ctcaaaaaggatgggtgggggaattataggtgaataaagaatggtacactcattcctgagggcaccaaggagggaggatagctttagatttctaaaggagggtattatccattcatgaag

SEQ ID NO: 121503 - DNA, 120 bp, synthetic construct
  source 1..120: mol_type = other DNA
ctggaatattttccattactggtatcacatctgaatggaagatgttgaaaggtctctcatcttgtaagatggatatgaaagaatattttctgagaaatgaaattattaacacacctgcga

SEQ ID NO: 121504 - DNA, 120 bp, synthetic construct
  source 1..120: mol_type = other DNA
atatagaaatatatctatacaaataatagtatattatacacagatgtacaaatatatactatacatataaaaactccaggaaaggcaaggtagtcaacacgcctatgctgtcttgaagtt

SEQ ID NO: 121505 - DNA, 120 bp, synthetic construct
  source 1..120: mol_type = other DNA
cctaaaggtaagtagcaccaaggttgagaaaccataatctaggcagtaaacactacgtagctattccaagtgctcaggaaaacacataagtgccctcgaggggaaaagtgtaaacatttt

SEQ ID NO: 121506 - DNA, 120 bp, synthetic construct
  source 1..120: mol_type = other DNA
cagggaaaaaaaaaaggttatgtgagaaaacgaccctggctagcaaaagtggacttattacataggtggaaactcacggggagcagtcctcagagagaatagacagaaaatgtttctttc

SEQ ID NO: 121507 - DNA, 120 bp, synthetic construct
  source 1..120: mol_type = other DNA
tgcttgcttatacaaggaaaattgaagctcaacctaaaattatataggaaataaaggaaaaattttaagggagctctttaataacataaacatatatatatatatacacacacacacaca

SEQ ID NO: 121508 - DNA, 120 bp, synthetic construct
  source 1..120: mol_type = other DNA
gatggtgcaaaaaattttcataagcatgtatttctgaatgcctgatagattgacgtatataataagctgttagtattaaaatatgtgatggaaaatgcatccaatcttctcactgtttac

SEQ ID NO: 121509 - DNA, 120 bp, synthetic construct
  source 1..120: mol_type = other DNA
agctgctctcattttatgctctcaccaagccgaaagctgaagttcaacaatcagtgtgtctaagtgtcactgattatataccattttgtagtttcagctatctttccaacttcctaaatc

SEQ ID NO: 121510 - DNA, 120 bp, synthetic construct
  source 1..120: mol_type = other DNA
aaaagaggaaaggaagggagggaggaaagaagaaaaggagggcgggaggaagggagaaaaaaggaaagaaaggacgaacgtgagaaagaaagaaagaatatgagaaaagaaggaagaaaa

SEQ ID NO: 121511 - DNA, 120 bp, synthetic construct
  source 1..120: mol_type = other DNA
gttggattttccatcacttattttagaatatttttggcagttattttgaaaaatatttcttttgctccattatttttccctcttttctttttgggatttcaatcataactagagtaggta

SEQ ID NO: 121512 - DNA, 120 bp, synthetic construct
  source 1..120: mol_type = other DNA
catccttagattattctaaaagattcagttagatcaagttggctaattatatttataagatcctctctatccttaccaacttttcgtttaacaaaatttaaaaatttctggcaggagact

SEQ ID NO: 121513 - DNA, 120 bp, synthetic construct
  source 1..120: mol_type = other DNA
ttccattcgatgatgattccattcaagaccattcgaggactccattcaattccattcaataacgattccattcgagtccatttgatgattccattcaagtccattcagtgattccatctg

SEQ ID NO: 121514 - DNA, 120 bp, synthetic construct
  source 1..120: mol_type = other DNA
gcaattccattcgatgatgacacctttcgtttccattcgatgatgattccattcggttccatttgatgataattcctttagattccatttgatgacgattccattcaactccaattgatg

SEQ ID NO: 121515 - DNA, 120 bp, synthetic construct
  source 1..120: mol_type = other DNA
tcaacgattccattcaaatccgtttgatgatgattccattcgattccattcgatgatgattccatgcgattctattcgatgatgactccgttcggttccatttgatgatgaatccattcg

SEQ ID NO: 121516 - DNA, 120 bp, synthetic construct
  source 1..120: mol_type = other DNA
aaatacccttgtatagagcaaaggggaaactcttcaaggcaaatggagtgtatgttgtatcagcgggggctctctagtcttggatttcaaactgtgatgtttattgtgcagaaaggagat

SEQ ID NO: 121517 - DNA, 120 bp, synthetic construct
  source 1..120: mol_type = other DNA
atcattcatctttaaggtccattctgctgcccgtttcccaggagaaatcttcagtctaattccacatatccgtggccaaggcctgttggaagttgaaaccatctttgtagaattataagt

SEQ ID NO: 121518 - DNA, 120 bp, synthetic construct
  source 1..120: mol_type = other DNA
ctttccactaaaaagtgtttttgatgaatttgagacgggttgaggagtagcaacgtggagttctccagtgttgtcccaggggatctattactcatcaaaaatctctccctacattactca

SEQ ID NO: 121519 - DNA, 120 bp, synthetic construct
  source 1..120: mol_type = other DNA
ccaccagccaatatgtcaggagacaaggagttggggcaaggaaggtgactttagtttgaagatccagaaaatgaagaagatggtggactaatgttctaaagaagcaggttaagttagtac

SEQ ID NO: 121520 - DNA, 120 bp, synthetic construct
  source 1..120: mol_type = other DNA
caggagaattacttgaacccggggcataggttgcagtgagccatgatcatgccactgccctccagcatgggtgacagagtgagactttatctcaaacaaacaaacaaaaaaaggtctctt

SEQ ID NO: 121521 - DNA, 120 bp, synthetic construct
  source 1..120: mol_type = other DNA
aaaaaacctacaagacaatccacagaattggagagaatattttttgaaaagctcgttaagtttaaaactctaagtgtggaataaacaaagtcgggcaagcgcggacaggcgccggcggac

SEQ ID NO: 121522 - DNA, 120 bp, synthetic construct
  source 1..120: mol_type = other DNA
ggtttgtgggcctgtgcagagccctcttcccctgataatttcctcaaaacccacagtgagaggagagggccctgggggaagagaagttccttcccttgtctttgaaatgaattcctcctt

SEQ ID NO: 121523 - DNA, 120 bp, synthetic construct
  source 1..120: mol_type = other DNA
tgacattttgatgatttatgatgacaacattcacgaaatggatttccacacagtttctccctgatggactcaaaagtgttctctgtggaagacactgagccagaccaagaagcatccagg

SEQ ID NO: 121524 - DNA, 120 bp, synthetic construct
  source 1..120: mol_type = other DNA
cctgggcaacaagagcgaaacttggtctcagaaaaaaaaaaaaaaacatatatatatatacacacacacacacacacacacacacacacacacacacacacatttaccattttaaccatt

SEQ ID NO: 121525 - DNA, 120 bp, synthetic construct
  source 1..120: mol_type = other DNA
tgtctaagaaaaaaaacaagtgtgtacaatgtgaccgagaagctgggttaatcctttgcagagcaaagtgccatatgatggggaggaaaggaagagcaaatgtagactcaaaaatgcctg

SEQ ID NO: 121526 - DNA, 120 bp, synthetic construct
  source 1..120: mol_type = other DNA
gggttcaagtgattctcctgtctcagcctcccaagtaactgggattacaggcatgtgccaccacgttagggtaatttttttgtatttttgtagagatggggtttcaccatgttggccagg

SEQ ID NO: 121527 - DNA, 120 bp, synthetic construct
  source 1..120: mol_type = other DNA
aggaagttgggaacatactccatgtagttaaattctgggcattaaaactgcttatcatctgaagttttatgaacagctgtgggtagagtgtggtggctcacaccaataatcccagcactt

SEQ ID NO: 121528 - DNA, 120 bp, synthetic construct
  source 1..120: mol_type = other DNA
gctgatctctcggcagaaactctacaagccagaagagagttggggccaatattcaacattcttaaagaaaagaattttcaacccagaatttcatatccagccaaactaagcttcataagt

SEQ ID NO: 121529 - DNA, 120 bp, synthetic construct
  source 1..120: mol_type = other DNA
cttgggaatggggagaaaaaggaatctctaccccaagaccaaaaataataagtcctgtttctggtcctgaacatccagaattatggaggcttactgtggcctcacaccacattagaattt

SEQ ID NO: 121530 - DNA, 120 bp, synthetic construct
  source 1..120: mol_type = other DNA
acagcgaccatcgagaacgggccatgacaacgatggcggttttgtggaaaagaaaagggggaaatgtggggaaaagcaagagagatcagattgtcactgtgtctgtgtagaaagaagtag

SEQ ID NO: 121531 - DNA, 120 bp, synthetic construct
  source 1..120: mol_type = other DNA
taaaaataaggtgaacaataaatgtaatgtgcttgaatcatcccgaaaccttccctcacaccaggtcaatggaacaattgtcttccatgaaactggtccctggtgccaaaaaggttggga

SEQ ID NO: 121532 - DNA, 120 bp, synthetic construct
  source 1..120: mol_type = other DNA
tgaagagatacctgcactctcatgttcatggccgcactattcacagcagccaagatgggaaatcaagttaagtgtccatcaatggataaattaaatgtggcttatatacacaatggggac

SEQ ID NO: 121533 - DNA, 120 bp, synthetic construct
  source 1..120: mol_type = other DNA
atgcttccatcagaaggaaagggacagtgaagcctttacaaggaaaactgaatttgctccaattcactgagggagagagttcccacctaattattactacttccaagttactcgtatccc

SEQ ID NO: 121534 - DNA, 120 bp, synthetic construct
  source 1..120: mol_type = other DNA
atcagactccaagttcttcagttttgagactcgaaatggccttccttgctcctcagcttgcagatggcctattgtgggaccttgtgatcatgtgtgagtttatacttaataaactcatat

SEQ ID NO: 121535 - DNA, 120 bp, synthetic construct
  source 1..120: mol_type = other DNA
ttgggaccttaacacctacctaatggtcctaatagacttctagagagctccccaccccaaaataacagaatataccttcttctcatctgcacatggcacataatctaaaattgaacagac

SEQ ID NO: 121536 - DNA, 120 bp, synthetic construct
  source 1..120: mol_type = other DNA
gacctgtggagggggtccataatacctgatttaaaactcatgagagatctcaagccataactctacagccaagttgctctcaaatttctgacccatagaaaccatgacagacaataaaat

SEQ ID NO: 121537 - DNA, 120 bp, synthetic construct
  source 1..120: mol_type = other DNA
agcaacatgaatgtcaaaatgccgtctgttagtgagtcattgtttttttaaaagattagtgatggctttgtagtctttccgggaatactctgaaataccggttacggatagctctttgta

SEQ ID NO: 121538 - DNA, 120 bp, synthetic construct
  source 1..120: mol_type = other DNA
ccaacatcgcgggtctcgcctctcgcagcctttttggcgtccgcgcctcagcgttgaagccagggcccctcgtgagctcggcgcccagcctgtcaagtcctcttctgcctcagctctcac

SEQ ID NO: 121539 - DNA, 120 bp, synthetic construct
  source 1..120: mol_type = other DNA
tctactaaaacccagtaatccctagagggagaaagggcgtctcctgcagtattccactgaaactcgctggttttgctcgaattagacacttgaactatgtttttagaactcttcatctta

SEQ ID NO: 121540 - DNA, 120 bp, synthetic construct
  source 1..120: mol_type = other DNA
taacgttgagctctaaaagttttccatagtgttgagatgtaactcccccatgtcataccacatgttgttccccatcataagatgttgttccctcatcataagatgagggattgagggtgt

SEQ ID NO: 121541 - DNA, 120 bp, synthetic construct
  source 1..120: mol_type = other DNA
ttggagggactctggctttgtgtgtttgggctagccttcctgtgtagtcagtaagatgttcctgcagtgtactttgggatctttctgcacaaattcagtagacagtgtgattttttttca

SEQ ID NO: 121542 - DNA, 120 bp, synthetic construct
  source 1..120: mol_type = other DNA
ccagttttcttttacataagcctcttcttttgttgaaaacataagatcttcctcacagtggagaaacctgaaagctcccagcagccagtaatgaatgaaaggtgggggcggggctgccgg

SEQ ID NO: 121543 - DNA, 120 bp, synthetic construct
  source 1..120: mol_type = other DNA
tcggatttcggagcccgcgagggccatgacctgcaacacatcagtgaccaggagatgcccaaaagtaaggaggcgactgatagtgtttgccctcaggtgagcctctggcagccgctgtcc

SEQ ID NO: 121544 - DNA, 120 bp, synthetic construct
  source 1..120: mol_type = other DNA
tgataagtagaaggaggagggcgtgtgtatgattcatctaaaagtggcatcagtttatttaggtgcaagttctaaaatgaagtcccagacacagcctggttttattccacatacgtggag

SEQ ID NO: 121545 - DNA, 120 bp, synthetic construct
  source 1..120: mol_type = other DNA
actgaggggtctcattgtggggatttggaggtcaagccagcttttcttttggggaaactcagtgtattatatgtgggtattttctttgcaatggtttagttttcttccaaggaggatctc

SEQ ID NO: 121546 - DNA, 120 bp, synthetic construct
  source 1..120: mol_type = other DNA
tttacaggccaaagacgatgggtaatactttggaaactactcttgaaagaaggaacagcttgtcctccagtggtgccatagtatatctgcatttacattttgccatcatgcatgagcact

SEQ ID NO: 121547 - DNA, 120 bp, synthetic construct
  source 1..120: mol_type = other DNA
gtaggttcttttctattttctttaagtgtcggccagtctgagaaataaagaaaaagagtacaaagagaggaattttacagctgggcctccaggggtgtcatcacatattggtaggaccgt

SEQ ID NO: 121548 - DNA, 120 bp, synthetic construct
  source 1..120: mol_type = other DNA
taagaaattataaaagtattaattttgggaactgataaatgtccatgaaatcttcacagtttatgttcttctgccttggctccagctggtccctctgttcggggtccctgacttcctgca

SEQ ID NO: 121549 - DNA, 120 bp, synthetic construct
  source 1..120: mol_type = other DNA
aaaggaagatttggtaaatctgaatctcattcacatttattacaagttataagtttattgccaaccactactgctttataaaatgctcttgcgttccagcatgtggttagaggagtgaaa

SEQ ID NO: 121550 - DNA, 120 bp, synthetic construct
  source 1..120: mol_type = other DNA
cacatcactgcacaccagccctgggtgatggagccagaccttgtctcaaaaagaaaaacaaaaatctacttttgccaccactttgccaatagtgtaaaccaagtgatcatggtgatattt

SEQ ID NO: 121551 - DNA, 120 bp, synthetic construct
  source 1..120: mol_type = other DNA
agaccggttccaaacagtgctgttggtgtgtgaatggtgaaacaccaggagctatgctccaagaaggctgcttctgtttatgatcttgggaatttgaaaagcattacatcaaagtgttta

SEQ ID NO: 121552 - DNA, 120 bp, synthetic construct
  source 1..120: mol_type = other DNA
gctgggttttaagttcagcaaatgagatcacctcattttggctcgtggtctaactgccccccttacaggagaacatcaagcatttgttgacttagccagtgggtaaaatattaaaacttt

SEQ ID NO: 121553 - DNA, 120 bp, synthetic construct
  source 1..120: mol_type = other DNA
gataaagcccagaaactggaggtaaggatgtgaagtcacttagtggagttttccataggccacaaaagccaaaatctgttacaaaatcatattaagtagtgatttggaaaatgaaagcct

SEQ ID NO: 121554 - DNA, 120 bp, synthetic construct
  source 1..120: mol_type = other DNA
tggagctaaaaaaactttagaattggctccagatttgtgagagcacctgggtttggttctctgtccactgaggcactgaatgcatgatggcccaaaactcaacaatgttgggaagagaga

SEQ ID NO: 121555 - DNA, 120 bp, synthetic construct
  source 1..120: mol_type = other DNA
cctgtgccttgttctagacatttgaatatggcaaagtgagggagtggctctctgcgagttacctttcctttccttttatcgggaactataggaatccctattttctttcttgcgtttact

SEQ ID NO: 121556 - DNA, 120 bp, synthetic construct
  source 1..120: mol_type = other DNA
ggtccttctgtagggcgtctgggagatagatccgtggggctcctagggtcgcccctacccggcgcggggtattttcccgtcttcagacctttctgggtcccggaggaaggaagtgaaact

SEQ ID NO: 121557 - DNA, 120 bp, synthetic construct
  source 1..120: mol_type = other DNA
tgggtttcatttctgttgtagtttgcatcattgcatcattacattattcctcttggatggcaagtggagttctattgcatggacatgaccacatgttatgtgcattcatatgagcgtctt

SEQ ID NO: 121558 - DNA, 120 bp, synthetic construct
  source 1..120: mol_type = other DNA
actataagatttctccaaagaattttgtctttaacctcttacattttgatatattaccctttctgagtatttttgggggtctgtggtttgagttaggagtccactttttccttttgcaaa

SEQ ID NO: 121559 - DNA, 120 bp, synthetic construct
  source 1..120: mol_type = other DNA
tttcttacaaatatttatacaaaatcatgacatgtgaaatgacctatttctttttcaatctggggagtgggtaagagacgggttctgcctaggcctggcccttcttcccatctggtcatt

SEQ ID NO: 121560 - DNA, 120 bp, synthetic construct
  source 1..120: mol_type = other DNA
atctggtttccttctgaccggtgtccttaggtcagactctggacctttctgagcctcatacacccttatttggggtgagaaggaggggaccatatctgagctcccggaggtcctatttct

SEQ ID NO: 121561 - DNA, 120 bp, synthetic construct
  source 1..120: mol_type = other DNA
tgggagattaggattagtgattcaacagggaagggggacctacacagagcagcggccagtttgtggaggaagctaaattccattcccacaagacaagtcttcagtgacgcttaagggtca

SEQ ID NO: 121562 - DNA, 120 bp, synthetic construct
  source 1..120: mol_type = other DNA
gtgtggagtgggaaatcaggggtcccacagccttcagagctgagagccctgaacagagatttacccacatatttactgacagcaagtcagtgataagcattgtttctatagattatatat

SEQ ID NO: 121563 - DNA, 120 bp, synthetic construct
  source 1..120: mol_type = other DNA
cttgaggattaactcctcctgtaaaagatgaggaatacaccatttggcaatttgggcatcatggataatagctttagcttctttccaggtaatgctgtatctgcatttgagaccagaggc

SEQ ID NO: 121564 - DNA, 120 bp, synthetic construct
  source 1..120: mol_type = other DNA
gccttcatgaggaggacaataatttttctaggatcatatccatgtaatttaacaatctgagttctctcatttcctatcatagtagcgttttgatccaaataaggagttagagtccatgaa

SEQ ID NO: 121565 - DNA, 120 bp, synthetic construct
  source 1..120: mol_type = other DNA
gcctttataaactcacatgtgtttgctttggaaaaactttttcagggggagcccaaagatgtgaccttctcagcgtgccccttctcctccctaggcagggtctccttctcagcatatccc

SEQ ID NO: 121566 - DNA, 120 bp, synthetic construct
  source 1..120: mol_type = other DNA
agggtctccttctcagcgtgcccccttctcctccctaggcagggtctccttctcagcatgcccccttctcctccctaggcagggtctcctcagcttgctcccttctcctccctaggcagg

SEQ ID NO: 121567 - DNA, 120 bp, synthetic construct
  source 1..120: mol_type = other DNA
gataactatattgtaatagttatccggataactatattgtaatagttatccggataactatattgtaatagttatccggataactatattgtaatagttatccggataactatattgtta

SEQ ID NO: 121568 - DNA, 120 bp, synthetic construct
  source 1..120: mol_type = other DNA
gggataacaggcataagccaccgtgcctagcccctgtgatatgtttattctaattcacaagtatacttctcaggaacttctgtagaagtttttgaggcattgggagtagaaaagtctctt

SEQ ID NO: 121569 - DNA, 120 bp, synthetic construct
  source 1..120: mol_type = other DNA
agaaaatctagaagaaatggatacattcctcgacacatacactctcccaagactaaagcaggaagaagttgaatctctgaatagaccaataacaggctctgaaattgtggcaataatcaa

SEQ ID NO: 121570 - DNA, 120 bp, synthetic construct
  source 1..120: mol_type = other DNA
tcctacccatgagcatggaatgttcttccatttgtttgtgtcctcttttatttccttgagcagtggtttgtagttctccttgaagaggtccttcacatcccttgtaagttggattcctag

SEQ ID NO: 121571 - DNA, 120 bp, synthetic construct
  source 1..120: mol_type = other DNA
tcgaggaatgtatccatttcttctagattttctagtttatttgcatagaggtgtttgtagtattctctgatggtagtttgtatttctgtgggattggtggtgatatcccctttatcattt

SEQ ID NO: 121572 - DNA, 120 bp, synthetic construct
  source 1..120: mol_type = other DNA
gtaccagttggtgaattctcacaatcatatacagcaaaaccaccaccataatttacaaaattttgcctccaactgcagaaaattccatggtgtccttttgtggtcattccccacctccag

SEQ ID NO: 121573 - DNA, 120 bp, synthetic construct
  source 1..120: mol_type = other DNA
gctcagggagactgatttgagtaataataaagctctggtcacccatacagccggctttgtgtgatttactctttctccactgcaattcccctgtcttgataaatcagttctgtctaggca

SEQ ID NO: 121574 - DNA, 120 bp, synthetic construct
  source 1..120: mol_type = other DNA
gcctctgtgaccgacgctggtactacgactgtagccattgttcctaccgcctctgtgactaccgcctctgtgaccgacgctggtactacgactgtagccattgttcctaccgcctctgtg

SEQ ID NO: 121575 - DNA, 120 bp, synthetic construct
  source 1..120: mol_type = other DNA
tgctagtctagtgattactcctctggttaccactatgatcatggctgagactgttgcttctgcaatagtgactgctgttgctgctggtattactgctacctttagtactgtaactcactt

SEQ ID NO: 121576 - DNA, 120 bp, synthetic construct
  source 1..120: mol_type = other DNA
tcgtgcagaagaagtgggaatggtgaaattccggaaggtcgtgcagaagaagtgggaatggtgaaattccggaaggtcgtgcagaagaagtgggaatggtgaaattccggaaggtcgtgc

SEQ ID NO: 121577 - DNA, 120 bp, synthetic construct
  source 1..120: mol_type = other DNA
gatcccacttggtatctctgtgggaacggaagggaggggaggccgtggggacggaggggaggggaggccgcggggacggaggggaggggaggccgcggggacggagggggaggggaggcc

SEQ ID NO: 121578 - DNA, 120 bp, synthetic construct
  source 1..120: mol_type = other DNA
caccctccctgccctccgtgctcctgccacgcaccctccctgccctccttgctcctgccacgcaccctccctgccctccgtgctcctgccactcaccctccctgccctccgtgctcctgc

SEQ ID NO: 121579 - DNA, 120 bp, synthetic construct
  source 1..120: mol_type = other DNA
gggacagagggtggggaaggtgactggacagagggtggggaaggtgacgggacagagggtggggaaggcgaggggacagagggtggggaaggtgaccggacagagggtggggaaggcgag

SEQ ID NO: 121580 - DNA, 120 bp, synthetic construct
  source 1..120: mol_type = other DNA
ggaagtgcacaggtctgagtggagtatggggctgtctccaggggagaggtggctgtttggagggaagggtgacaatggataatcagggtccatgggcatccctgcttgttttggagccat

SEQ ID NO: 121581 - DNA, 120 bp, synthetic construct
  source 1..120: mol_type = other DNA
tacatttgtagtcttggctccttggaaggctgatgtgggaggattgcttaagcctaggaggtcgaggctacagtgagccatgattgcaccgttgcattccagcctgggcaagagtgaaac

SEQ ID NO: 121582 - DNA, 120 bp, synthetic construct
  source 1..120: mol_type = other DNA
tgtgggagacaccgcagacgtttggggtgggatgggggcgctgagatcactgtagtgcaaacagcatcaaatggaacatgacacacaactcctttggccgccccctgaaagtgtggggga

SEQ ID NO: 121583 - DNA, 120 bp, synthetic construct
  source 1..120: mol_type = other DNA
agtggtgacgctcgatggctcggaaggacagtggtgacgctcgatggctcggaaggacactggtgacgctcgatggctcggaaggacagtggtgacgctcgatggctcggaaggacagtg

SEQ ID NO: 121584 - DNA, 120 bp, synthetic construct
  source 1..120: mol_type = other DNA
acacccggctaattagtgtatttttttgttttaccatgtcgcccaggctggtctctaactctcgggctcgagtaatcctccggcctcagcctcctaaagtgctgggataataggcaggag

SEQ ID NO: 121585 - DNA, 120 bp, synthetic construct
  source 1..120: mol_type = other DNA
cagacagatcaggaaaacggaatgacatcgagctacacgctgtcatcagacagatcagggaaacggaatgacatcgagctacacgctgtcatcagacagatcaggaaaacggaatgacat

SEQ ID NO: 121586 - DNA, 120 bp, synthetic construct
  source 1..120: mol_type = other DNA
aatgacatcgagctacacgctgtcatcagacagatcaggaaaacggaatgacatcgagctacacgctgtcatcagacagatcagggaaacggaatgacatcgagctacacgctgtcatca

SEQ ID NO: 121587 - DNA, 120 bp, synthetic construct
  source 1..120: mol_type = other DNA
taaataggaccaataaatcctttggaagagccatggggtgaactgaggcttgtcttttttttttttttcaatagagatggagtctgactatgttgcccaagctggtctccaactcctggg

SEQ ID NO: 121588 - DNA, 120 bp, synthetic construct
  source 1..120: mol_type = other DNA
gggaaagtcgagacccagcagtttccaggacagtgagggtgggaaggggcctgatggagggagtgaggagcaggacagtgagggtaggaggcggcctgatgcagggagtgaggcgcagga

SEQ ID NO: 121589 - DNA, 120 bp, synthetic construct
  source 1..120: mol_type = other DNA
tcccttttgcaattacacatctgtataaggctggattttcttcatacatgtcaaccaaaataacatatcactacaaataaatgcagaagctgatacaggaatctagctcccttgtgttaa

SEQ ID NO: 121590 - DNA, 120 bp, synthetic construct
  source 1..120: mol_type = other DNA
gttctcaatgagctgttgggcacacctcccagacggggtggtggccgggcagaggggctcctcacttcccagtaggggcggccgggcagaggcgcccctcacctcccggacggggcggct

SEQ ID NO: 121591 - DNA, 120 bp, synthetic construct
  source 1..120: mol_type = other DNA
ggcggacctgctcgcgggaggagatgaccttaccatcctggacctcttccacaatggtaggcacctgacaggtggtcaccgctgcaggagaagcaggcaatttaaagtgggtaggggcca

SEQ ID NO: 121592 - DNA, 120 bp, synthetic construct
  source 1..120: mol_type = other DNA
cctgcttgaagaaaaccaggaaagcaggccaacccacctggcagtttccagatttactacaaggaagatttccaggtgtcaggctcacctcccacagactgctccccacagccacgtttg

SEQ ID NO: 121593 - DNA, 120 bp, synthetic construct
  source 1..120: mol_type = other DNA
ggctcaggaggccagaatgggggagccccccggtgtgcccagagagctgagccagtagaggcagtggttgccaggggctggtggggagacttgagtgactttgtccaaggaccccaagtg

SEQ ID NO: 121594 - DNA, 120 bp, synthetic construct
  source 1..120: mol_type = other DNA
tctgagcctcagtttccttgtctgggaaatgggaataacagccctgcgtcacaggcatattaggggatttgaggccaaataaataaagcacctggcaaaggctggtggctagcgttatgt

SEQ ID NO: 121595 - DNA, 120 bp, synthetic construct
  source 1..120: mol_type = other DNA
cagagaagacacgcaagaaacaaaacaagcaaattaatcttccacttttgcacctgcagaaaacgtctcaagaaccagaaatggctaaggattgtgatagagaggatatacctatatatc

SEQ ID NO: 121596 - DNA, 120 bp, synthetic construct
  source 1..120: mol_type = other DNA
tgttcaacttcataaagaggtagggttttacttgctgccactctttgttttttctctcaattatctggtccattctgattttccacttaggaaaagcatatgaaaagcatacagtttggt

SEQ ID NO: 121597 - DNA, 120 bp, synthetic construct
  source 1..120: mol_type = other DNA
gaagaatttttcttagtacagaacaaaatggagtctctcatgtctacttctttctatatagacacagtccgtatagaaagagacactgatctctctcttccccacacccacccccacccc

SEQ ID NO: 121598 - DNA, 120 bp, synthetic construct
  source 1..120: mol_type = other DNA
ttgtttgtgcagaacaggcaccccaagtgggtccaggctgctgaggacatgtgcctgggctggactggggacccagctatgggactcatggaaggactcacagttcgtccacagccaccc

SEQ ID NO: 121599 - DNA, 120 bp, synthetic construct
  source 1..120: mol_type = other DNA
tttgtggagaagggcttcttccccagcagaggggcacagtctggggctgtctctggtccttcccacactctgacccctcctcactcacgccatcagtaattgtggaccccaggctctaca

SEQ ID NO: 121600 - DNA, 120 bp, synthetic construct
  source 1..120: mol_type = other DNA
ctcatagagggtgccgggagtggctggagcaggactgttccttctcattttcctaggaggcagtttctaccctccctcacaccacccctgtccctagtggggaaccaaagaggatccaga

SEQ ID NO: 121601 - DNA, 120 bp, synthetic construct
  source 1..120: mol_type = other DNA
ggagggcgaggatgcccagtgagtgggggagcctggggtcagggctgggggcctcttggcaggggtggggctctcagactcacatctaatttcctctctgttttttttttctttcagcct

SEQ ID NO: 121602 - DNA, 120 bp, synthetic construct
  source 1..120: mol_type = other DNA
atgacattcttctagactgaaaaatgcacgtgtccttgaccaaataacaactctctttcttgtacagatggcccagacactcagaaactgcctattcagaacatggcacatcatagagat

SEQ ID NO: 121603 - DNA, 120 bp, synthetic construct
  source 1..120: mol_type = other DNA
ggacagactccctggatcttttggctgtaacgaatgtcaggaaacaaagggactgcgctgggactggggctggggctgtgtctcccattctcccttctctctctgtctctcaccctctgt

SEQ ID NO: 121604 - DNA, 120 bp, synthetic construct
  source 1..120: mol_type = other DNA
tgactgttgcagaaacctctgtggtcctctggcaggcatttcaacatgtggcttggctgaggcacaagccccgtccaggttcccaggtcttctttgtgttcccttggcactcagggaaag

SEQ ID NO: 121605 - DNA, 120 bp, synthetic construct
  source 1..120: mol_type = other DNA
cctttctctctctgtctctcaccctctgtgtgcttctttccctctgtgtgtgtgtgtgtgtgtgtgtgtgtgtgtgtgtgtgtgtgtgtgtgtgtctttggacgaatgtgccctgtgcgt

SEQ ID NO: 121606 - DNA, 120 bp, synthetic construct
  source 1..120: mol_type = other DNA
gtctgtgcaggcctcgataacgtgaggggatgcatcgggccctccgtggcagcgcttgggtgtcgggcctccgaggctccggcctgacctctccacggggtccacaggaacgtctccggc

SEQ ID NO: 121607 - DNA, 120 bp, synthetic construct
  source 1..120: mol_type = other DNA
ccctctgtgtgtgtgtgtgtgtgtgtttgtgtgtgtgtgtgtgtgtcttttgacgaatgtgccctgtgcgtcaaaaagggatgtcttttatgtcgaccggtctttggtgagcctctttct

SEQ ID NO: 121608 - DNA, 120 bp, synthetic construct
  source 1..120: mol_type = other DNA
cgactgagtttaactcacagggctgaacattcctttggatggagcagtttggaaacacactatctgtaggatctgcaagcggatacttgggcctctctgaggatttcgttggaaacggga

SEQ ID NO: 121609 - DNA, 120 bp, synthetic construct
  source 1..120: mol_type = other DNA
aggcctatcatagtaaaggaaataacttcatataaaaacaagacagatgcattctcagaaactactttgtgacgatggcattcaagtcacagaggtgaacattccctttcagagagcact

SEQ ID NO: 121610 - DNA, 120 bp, synthetic construct
  source 1..120: mol_type = other DNA
cttcggagagagcagctatgaaacactctttttctagaatctgcaagtggacattgggaaggctgtgaggtttgtggtggaaaaggaaatatctccacataaatactagatagaagcctt

SEQ ID NO: 121611 - DNA, 120 bp, synthetic construct
  source 1..120: mol_type = other DNA
tggaatctgcaaggggacatgcagacctctttgaaggtttcgttggaaacggaatcatcttcacataaaaattacacagaagcattctcaggaactccttggtgatgtttgtattcaact

SEQ ID NO: 121612 - DNA, 120 bp, synthetic construct
  source 1..120: mol_type = other DNA
tctcagaaacttctctgtgatgtttgtgttcaactcacagagtttcacgttgcttttcatagagcagatgagaaacatgcttttcgtagggtctgcaagtggacatttggagagatttcc

SEQ ID NO: 121613 - DNA, 120 bp, synthetic construct
  source 1..120: mol_type = other DNA
agttttctcagaaaattctctgcgatgattgagttgaactcacagagcagtactttccttgggatggagtagtttcgaaacacactttctgtagaatctgcaagtggatatttggacctg

SEQ ID NO: 121614 - DNA, 120 bp, synthetic construct
  source 1..120: mol_type = other DNA
atttgtagggctttgaggcctgaggtggaacaggaattatcttcccgtaagaactagatagatgcattctcagaaactactttgtgacgattgcattcaagtcacagaggtgaacattcc

SEQ ID NO: 121615 - DNA, 120 bp, synthetic construct
  source 1..120: mol_type = other DNA
aggatctgcaagtgtttatttggaccactctttggccttccttcgaaacgggtacatcttcatataaaatctagacagaagccttctcagaaacttctctgtgacgattgcattcaactc

SEQ ID NO: 121616 - DNA, 120 bp, synthetic construct
  source 1..120: mol_type = other DNA
aaaccgcacagaactaaacagaagcattctcagaaccttcttcgtgacgtttgcattcaacccacagtgttgaaactttctttgatagttcaggtttgaaacactcttttcgtagaaaat

SEQ ID NO: 121617 - DNA, 120 bp, synthetic construct
  source 1..120: mol_type = other DNA
ttgtgatgattgagtttaacacacagagctgaacattcctttggatggagaaggtttgaaacacactttctgtagaatctgcgagtggatattgggacctctctgaggatttctttggaa

SEQ ID NO: 121618 - DNA, 120 bp, synthetic construct
  source 1..120: mol_type = other DNA
gaatgcattctcagaaagtactttgtgacgattgcattcaagtcacagaggtgaacattccctttcacagagcactttggaaactctcgttgtgtagaatctgcaagtggagatatggac

SEQ ID NO: 121619 - DNA, 120 bp, synthetic construct
  source 1..120: mol_type = other DNA
caaggggacttgcagacctctttgaaggtttcgttggaaacggaatcatcttcacataaaaattacacagaagcatcttcaggaactccttggtgatgtttgtattcaacttccagagtt

SEQ ID NO: 121620 - DNA, 120 bp, synthetic construct
  source 1..120: mol_type = other DNA
agatttcaggcctgtggtggaaaacgaattatcgtcacgtaaaaactagagggaagcattgtcagaaacttgtttgtgatgactgcattcaactcacagtagttgaaggttccttttcaa

SEQ ID NO: 121621 - DNA, 120 bp, synthetic construct
  source 1..120: mol_type = other DNA
gtggatatttggacctgtctgaggaattcgttgcaaacgggataatttcagctaagtaaacagaagcagtctcagaatcttcttgtgatgtttgcattcaaatcccagaattgaaccttc

SEQ ID NO: 121622 - DNA, 120 bp, synthetic construct
  source 1..120: mol_type = other DNA
actctttttctagaatctgcaagtggacattgggagggctgtgaggtttgtggtggaaaaggaaatatctccacataaatactagttagaagccttctcagaaactactttgtgatgatt

SEQ ID NO: 121623 - DNA, 120 bp, synthetic construct
  source 1..120: mol_type = other DNA
tcagaaacttgtttgtgatgactgcattcaacccacagagttgaaggttccttttcaagcagcagtttccaaacattctttctgtggcatctgcaagtggatgtttgggcctctttgaag

SEQ ID NO: 121624 - DNA, 120 bp, synthetic construct
  source 1..120: mol_type = other DNA
cccagaattgaaccttcctttgaaagttcaggttggaaacactctttttgcaggatctacaagtggatattcggaccactctgtggacttcattcgaaacgggtatatcttcacataaca

SEQ ID NO: 121625 - DNA, 120 bp, synthetic construct
  source 1..120: mol_type = other DNA
gcattcaactcacagagttgaaggttccttttcaaacagaagtttccaaacactctttctgtggcatctgcaagtggatgtttgggcctctttgaagatttcgttggaaacgggataatc

SEQ ID NO: 121626 - DNA, 120 bp, synthetic construct
  source 1..120: mol_type = other DNA
ttgtgatgtttgcattcaaatcccagaatggaaccttcctttgaaagttcaggttggaaacactctttttgcaggatctacaagtggatattcggaccactctgtggacttcgttcgaaa

SEQ ID NO: 121627 - DNA, 120 bp, synthetic construct
  source 1..120: mol_type = other DNA
tcctttgatagttcagctttgaaacactctttttgtaggttctgcaggtggatatttggaccactctttggccttcgttcgaaacgggtacatcttcaaataaaatctagacagaagcct

SEQ ID NO: 121628 - DNA, 120 bp, synthetic construct
  source 1..120: mol_type = other DNA
tcacagagcactttggaaaccctcgttgtgtagaatctgcaagtggagatatggactgctttggggcctatggtagtaaaggaaacagcttcatataaaaactagacagcagcattctca

SEQ ID NO: 121629 - DNA, 120 bp, synthetic construct
  source 1..120: mol_type = other DNA
gagtggagcattcctattgacagagcagtttggaaacactcttgttgtagaaactgctagtggatatttggagcgctttgaggcctatggtagtaaagggaagagcttcacataaaatca

SEQ ID NO: 121630 - DNA, 120 bp, synthetic construct
  source 1..120: mol_type = other DNA
gaacaggaattatcttcccgtaagaactagatagatgcattttcagaaactactttgtgacgattgcattcaagtcacagaggtgaacattccctttcagagagcactttggaaactctc

SEQ ID NO: 121631 - DNA, 120 bp, synthetic construct
  source 1..120: mol_type = other DNA
catcctcaggaactccttggtgatgtttgtattcaacttccagagttgaactttccttcggaaagagcagctatgaaacactctctttctagaatctgcaagtggacattgggagggctg

SEQ ID NO: 121632 - DNA, 120 bp, synthetic construct
  source 1..120: mol_type = other DNA
ctttgaagatttcgttggaaacgggataatcttcacagaaaagttaaacagaagcatgctcagaaacttctttgtgatgtttgctttcaactcacagagttgaactttccttttgagaga

SEQ ID NO: 121633 - DNA, 120 bp, synthetic construct
  source 1..120: mol_type = other DNA
tttgcattcaaatcccagaattgaaccttcctttgaaagttcaggttggaaacactctttttgcaggatctacaagtggatattcggaccactctgtggacttcgttcgaaacgggtata

SEQ ID NO: 121634 - DNA, 120 bp, synthetic construct
  source 1..120: mol_type = other DNA
gatctgcaggtggatatttggacaactctttggccttcgttcgaaacgggtacatcttcaaataaaatctagacagaagccttctcagaaacttctctgtgacgattgaattcaactcac

SEQ ID NO: 121635 - DNA, 120 bp, synthetic construct
  source 1..120: mol_type = other DNA
cagaggtgaacattccctttcagagagcactttggaaactctcgttgtgtagaatctgcaagtggagatatggaccgctttgaggcctatggtagtaaaggaaacagcttcatataaaaa

SEQ ID NO: 121636 - DNA, 120 bp, synthetic construct
  source 1..120: mol_type = other DNA
aaccttcttcgtgatgtttgcattcaacccacagtgttgaaactttctttgatagttcaggtttgaaacactctttttgtagaaacttcaagtggataactgcacttctttgaggcctat

SEQ ID NO: 121637 - DNA, 120 bp, synthetic construct
  source 1..120: mol_type = other DNA
gaggtgaactttccttcggaaagagcagctatgaaacactctttttctagaatctgcaagtggacattgggagggctgtgaggtttgtggtggaaaaggaaatatctccacataagtact

SEQ ID NO: 121638 - DNA, 120 bp, synthetic construct
  source 1..120: mol_type = other DNA
ccctattgacagagcagtttggaaacactcttgttgtagaataggctagtggagatttggagcgctttgaggcctatggtagtaaagggaagagcttcacataaaatctagacagaagca

SEQ ID NO: 121639 - DNA, 120 bp, synthetic construct
  source 1..120: mol_type = other DNA
gctttcaactcacagagttgaactttccttttgagagagaagctttgaaacactctttttctagaatctgcaagtggatatttggagggctttgaggcctgaggtggaaaaggaattatc

SEQ ID NO: 121640 - DNA, 120 bp, synthetic construct
  source 1..120: mol_type = other DNA
gactgcattcaactcacagagttgaacactccttttgagagcgcagttttgaaactctctttctctggaatctgcaaggggacatgcagacctctttgaaggtttcattggaaacagaat

SEQ ID NO: 121641 - DNA, 120 bp, synthetic construct
  source 1..120: mol_type = other DNA
ggatgattgagttgaactcacagagcagtactttccttgggatggagtagtttcgaaacacactttctgtagaatctgcaagtggatatttggacctgtctgaggaattcgttgcaaacg

SEQ ID NO: 121642 - DNA, 120 bp, synthetic construct
  source 1..120: mol_type = other DNA
gcacctaactaaacggaagcattctcacaaaattctttgtgatgtttgcattcaaatctcagagttgaaccttcctttgatagttcaggtttgaaacactctttttgtaggatctgcagg

SEQ ID NO: 121643 - DNA, 120 bp, synthetic construct
  source 1..120: mol_type = other DNA
atctgcaagtggagatatggaccgctttgaggcctatggtagtaaaggaaagagcttcatataaaaactaaacagcagcattctcagaaaactctttgtgacgactgagtttaactcaca

SEQ ID NO: 121644 - DNA, 120 bp, synthetic construct
  source 1..120: mol_type = other DNA
acacagagctgcacattcctttggatggagaaggtttgaaacacactttctgtagaatctgcgagtggatatttggaactctctgaggatttcgttggaaacgggataactgcacctaaa

SEQ ID NO: 121645 - DNA, 120 bp, synthetic construct
  source 1..120: mol_type = other DNA
tccctttcagagagcactttggaaactctcgttgtgtagaatctgcaagtggagatatggaccgctttgaggcctatggtagtaaaggaaacagcttcatataaaaactagacagcagca

SEQ ID NO: 121646 - DNA, 120 bp, synthetic construct
  source 1..120: mol_type = other DNA
atgtttgcattgaaatcccagaattgaaccttcctttgaaagttcaggttggaaacactctttttgcaggatctacaagtggatattcggaccactctgtggacttcgttcgaaacgggt

SEQ ID NO: 121647 - DNA, 120 bp, synthetic construct
  source 1..120: mol_type = other DNA
tctttggccttcgttcgaaacgggtacatcttcaaataaaatctagacagaagccttctcagaaacttctctgtgacgattgcattcaactcaaagcgttgaaccctcctatggatagag

SEQ ID NO: 121648 - DNA, 120 bp, synthetic construct
  source 1..120: mol_type = other DNA
ggcctctctgaggatttcgttggaaacgggataaaccgcacagaactaaacagaagcattctcagaaccttcttcgtgacgtttgcattcaacccacagtgttgaacctttctttggtag

SEQ ID NO: 121649 - DNA, 120 bp, synthetic construct
  source 1..120: mol_type = other DNA
cctcacggagttgagcattcctattgacagagcagtttggaaacactcttgttgtagaatctgctagtggagatttggagcgctttgaggcctatggtagtaaagggaagagcttcacat

SEQ ID NO: 121650 - DNA, 120 bp, synthetic construct
  source 1..120: mol_type = other DNA
gaaacaccctttttctagaatctgcaagtggatatttggagggctttgaggcctgaggtggaaaaggaattatcttcccgtaagaaccagatagatgcattctcagaaactactttgtga

SEQ ID NO: 121651 - DNA, 120 bp, synthetic construct
  source 1..120: mol_type = other DNA
ttgagagcgcagttttgaaactctctttctctggaatctgcaaggggacatgcagacctctttgaaggtttcgttggaaacggaatcatcttcacataaaaattacacagaagcattctc

SEQ ID NO: 121652 - DNA, 120 bp, synthetic construct
  source 1..120: mol_type = other DNA
caaagttgaacactccttttgagagcgcagttttgaaactctctttctctggaatctgcaaggggacatgcacacctctttgaaggtttcgttggaaacggaatcatcttcacataaaaa

SEQ ID NO: 121653 - DNA, 120 bp, synthetic construct
  source 1..120: mol_type = other DNA
ttcaactcacagagtttcacgttgcttttcatagagcagatgagaaacatgcttttcgtagggtctgcaagtggacatttggagagctttcaggcctgtggtggaaaacgaattatcgtc

SEQ ID NO: 121654 - DNA, 120 bp, synthetic construct
  source 1..120: mol_type = other DNA
atttggaccactctttggccttcgttcgaaacgggtacatcttcaaataaaatctagacagaagccttctcagaaacttctctgtgacgattgcattcaactcaaagagttgaaccctcc

SEQ ID NO: 121655 - DNA, 120 bp, synthetic construct
  source 1..120: mol_type = other DNA
acagcagcattctcagaaaactcttagtgacaactgagtttaactcacagggctgaacattcctttggatggagcagtttggaaatacactatctgtaggatctgcaagcggatacttgg

SEQ ID NO: 121656 - DNA, 120 bp, synthetic construct
  source 1..120: mol_type = other DNA
tctagaatctgcaagtggacattgggagggctgtgaggtttgtggtggaaaaggaaatatctccacataaatactagatagaagccttctcagaaactacgttgtgatgattgcattcac

SEQ ID NO: 121657 - DNA, 120 bp, synthetic construct
  source 1..120: mol_type = other DNA
tctttgtgatgtttgctttcaactcacagagttgaactttccttttgagagagaagctttgaaacactctttttctagaatctgcaagtggatatttggagggctttgaggcctgaggtg

SEQ ID NO: 121658 - DNA, 120 bp, synthetic construct
  source 1..120: mol_type = other DNA
ttctcagaaacttctttgtgatgtttgctttcaactcacagagttgaactttccttttgagagagaagctttgaaacactctttttctagaatctgcaagaggatatttggagggttttg

SEQ ID NO: 121659 - DNA, 120 bp, synthetic construct
  source 1..120: mol_type = other DNA
tctgtggacttcgttcgaaacgggtatatcttcacataacatctagacagaagcattctcagaaacttttctgtgatgactgcattcaactcacagagttgaacactccttttgagagcg

SEQ ID NO: 121660 - DNA, 120 bp, synthetic construct
  source 1..120: mol_type = other DNA
caggtggatatttggaccactctttggccttcgttcgaaaagggtacatcttcaaataaaatctagacagaagccttctcagaaacttctctgtgacgattgcattcaactcaaagcgtt

SEQ ID NO: 121661 - DNA, 120 bp, synthetic construct
  source 1..120: mol_type = other DNA
tgaggatttcgttggaaacgggataaaccacacagaactaaacagaagcattctcagaaccttcttcgtgacgtttacattcaacgcacagtgttgaacctttctttgatagttcaggtt

SEQ ID NO: 121662 - DNA, 120 bp, synthetic construct
  source 1..120: mol_type = other DNA
gttgagcactcctattgacagagcagtttggaaacactcttgttgtagaatctcctagtggagatttggagcgctttgaggcctatggtagtaaagggaagagcttcacataaaatctag

SEQ ID NO: 121663 - DNA, 120 bp, synthetic construct
  source 1..120: mol_type = other DNA
ctttttctagaatctgcaagtggatatttggagggctttgaggcctgaggtggaaaaggaattatcttcccgtaagaactagatagatgcattctcagaaactactttgtgacgattgca

SEQ ID NO: 121664 - DNA, 120 bp, synthetic construct
  source 1..120: mol_type = other DNA
gatttcgttggaaacgggatactcttcacagaaaagctaaacagaagcattctcagaaacttctttgtgatgtttgctttcaactcacagagttgaactttccttttgagagagaagctt

SEQ ID NO: 121665 - DNA, 120 bp, synthetic construct
  source 1..120: mol_type = other DNA
caaggggacatgcagacctctttgaaggtttcgttggaaacggaatcatcttcacataaaaattacacagaagcatcctcaggaactccttggtgatgtttgtattcaacttccagagtt

SEQ ID NO: 121666 - DNA, 120 bp, synthetic construct
  source 1..120: mol_type = other DNA
gatgtttgctttcaactcacagagttgaactttccttttgagagagaagctttgaaacactctttttctagaatctgcaagtggatatttggagggctttgaggcctgtggtggaaaagg

SEQ ID NO: 121667 - DNA, 120 bp, synthetic construct
  source 1..120: mol_type = other DNA
cagagcagtactttccttgggatggagtagtttcgaaacacactttctgtagaatctgcaagtggatatttggacctgtctgaggaattcgttgcaaacgggataatttcagctaagtaa

SEQ ID NO: 121668 - DNA, 120 bp, synthetic construct
  source 1..120: mol_type = other DNA
atctagacagaagccttctcagaaacttctctgtgatgattgcattcaactcaatgcgttgaaccctcctatggatagggcagttttgaatctctctttttgtggaatctgcaagtggat

SEQ ID NO: 121669 - DNA, 120 bp, synthetic construct
  source 1..120: mol_type = other DNA
gaattcgttgcaaacgggataatttcagctaagtaaacagaatcagtctcagaatcttcttgtgatgtttgcattcaaatcccagaattgaaccttcctttgaaagttcaggctggaaac

SEQ ID NO: 121670 - DNA, 120 bp, synthetic construct
  source 1..120: mol_type = other DNA
aagtggatatttggacgactctttggccttcgttcgaaacgggtacatcttcaaatgaaaactagacagaagccttctcagaaacttctctgtgacgattgcattcaactcaaagagttg

SEQ ID NO: 121671 - DNA, 120 bp, synthetic construct
  source 1..120: mol_type = other DNA
gccttcaaatcccagaattgaaccttcctttgaaagttcaggttggaaacactctttctgcaggatctacaagtggatattcggaccactctgtggacttcgttcgaaacgggtatatct

SEQ ID NO: 121672 - DNA, 120 bp, synthetic construct
  source 1..120: mol_type = other DNA
ctctttttgtggaatctgcaagtggatatgtgaacctctttgaagatgtctttggaaacgggaatatcttcacataaaaactaaacagaagcattctcagaaacttctctgtgatgtttg

SEQ ID NO: 121673 - DNA, 120 bp, synthetic construct
  source 1..120: mol_type = other DNA
cacagaactaaacagaagcattctcagaaccttcttcgtgacgtttgcattcaacccacagtgttgaacctttctttgatagttcaggtttgaaacactctttttgtagaaactgcaagt

SEQ ID NO: 121674 - DNA, 120 bp, synthetic construct
  source 1..120: mol_type = other DNA
aggtctttgaggcctgtggtggaaaaggaattatcttcccgtaagaactagatagatgcattctcagaaactactttgtgacgattgcattcaagtcacggaggtgaacattccctttca

SEQ ID NO: 121675 - DNA, 120 bp, synthetic construct
  source 1..120: mol_type = other DNA
aaatctagacagaagccttctcagaaacttctctgtgacgattgcattcaacccaaagagttgaaccctcctatggatagagcagttttgaatctctctttttgtggaatctgcaagtgg

SEQ ID NO: 121676 - DNA, 120 bp, synthetic construct
  source 1..120: mol_type = other DNA
tgaggcctatcgtagtaaaggaaataacttcctataaaaacaagacagaagctttctcaaaaaattctctgggatgattgagttgaactcacagagcagtactttccttgggatggagta

SEQ ID NO: 121677 - DNA, 120 bp, synthetic construct
  source 1..120: mol_type = other DNA
gaaggttggaaccacactttctgtagaatctgcgagtggatatttggacctctctgaggatttcgttggaaacgggataactgcacctaaataaacggaagcattctcacaaaattcttc

SEQ ID NO: 121678 - DNA, 120 bp, synthetic construct
  source 1..120: mol_type = other DNA
acagaagcattctcagaaacttttctgtgatgactgcattcaactcacagagttcaacactccttttgagagcgcagtttggaaactctctttctgtggcatctgcaaggggacatgcag

SEQ ID NO: 121679 - DNA, 120 bp, synthetic construct
  source 1..120: mol_type = other DNA
gaattatcttcccgtaagaactagatagatgcattctcagaaactactttgtgacgattgcattcaagtcacagaggtgaacattccctttcacagagcactttggaaactctcgttgtg

SEQ ID NO: 121680 - DNA, 120 bp, synthetic construct
  source 1..120: mol_type = other DNA
ctttgaaggtttcgttggaaacggaatcatcttcacataaaaattacacagaggcatcctcaggaactccttggtgatgtttgtattcaacttccagagttgaactttccttcggaaaga

SEQ ID NO: 121681 - DNA, 120 bp, synthetic construct
  source 1..120: mol_type = other DNA
ataacatctagacagaagcattctcagaaacttttctgtgatgactgcattccactcacagagttgtacactccttttgagagcgcagttttgaaactctctttctgtggaatctgcaag

SEQ ID NO: 121682 - DNA, 120 bp, synthetic construct
  source 1..120: mol_type = other DNA
ctcacagagttgaactttccttttgagagagaagctttgaaacactctttttctagaatctgcaagtggatatttggagggctttgaggcctgaggtggaaaaggaattatcttcccgta

SEQ ID NO: 121683 - DNA, 120 bp, synthetic construct
  source 1..120: mol_type = other DNA
cactatctgtaggatctgcaagcggatacttgggcctctctgaggattgcgttggaaacgggataaaccgcacagaactaaacagaagcattctcagaaccttcttcgtgatgtttgcat

SEQ ID NO: 121684 - DNA, 120 bp, synthetic construct
  source 1..120: mol_type = other DNA
agtggacattgggagggctgtgaggtttgtggtggaaaaggaaatatctccacataaatactacatagaagccttctcacaaactactttgtgatgattgcattcacctcacggagtgga

SEQ ID NO: 121685 - DNA, 120 bp, synthetic construct
  source 1..120: mol_type = other DNA
ccttcgaaacgggtacatcttcaaataaaatctagacagaagccttctcagaaacttctccgtgatgattgcattcaactcaaagcgttgaaccctcctatggatagagcagttttgaat

SEQ ID NO: 121686 - DNA, 120 bp, synthetic construct
  source 1..120: mol_type = other DNA
cctttgatagttcagctttgaaacactctttttgtaggatctgcaggtggatatttggacaactctttggccttcattcgaaacgggtacatcttcaaataaaatctagacagaagcctt

SEQ ID NO: 121687 - DNA, 120 bp, synthetic construct
  source 1..120: mol_type = other DNA
gatacactgcacagaactaaacagaagcattctcagaaccttcttcgtgatgtttgcattcaacccacagtgttgaacctttctttgatagttcaggtttgaaacactctttttgtagaa

SEQ ID NO: 121688 - DNA, 120 bp, synthetic construct
  source 1..120: mol_type = other DNA
cattcacctcacggagtggagcattcctattgacagagcagtttggaaacactcttcttgtagaatcggctactggagatttggagcgctttgaggcctatggtagtaaagggaagagct

SEQ ID NO: 121689 - DNA, 120 bp, synthetic construct
  source 1..120: mol_type = other DNA
agaatggaaccttcctttgaaagttcaggttggaaacactctttttgcaggatctacaagtggatattcggaccactctgtggacttcgttcgaaacgggtatatcttcacataacatct

SEQ ID NO: 121690 - DNA, 120 bp, synthetic construct
  source 1..120: mol_type = other DNA
cgaaacggctgcatcttcatataaaatctagacagaagccttctcagaaacttctctgtgacgattgcattcaactcaaagcgttgaaccctcctatcgatagagcagttttgaatctct

SEQ ID NO: 121691 - DNA, 120 bp, synthetic construct
  source 1..120: mol_type = other DNA
acttgggcctctctgaggattgcgttggaaacgggataaaccgcacagaacgaaacagaagcattctcagaaccttcttcgtgatgtttgcattcaacccacagtgttgaacatttcttt

SEQ ID NO: 121692 - DNA, 120 bp, synthetic construct
  source 1..120: mol_type = other DNA
ctcagaaactcctttgtgatgattgcattcacctcacggagttgagcactcctattgacagagcagtttggaaacactcttgttgtagaatctcctagtggagatttggagcgctttgag

SEQ ID NO: 121693 - DNA, 120 bp, synthetic construct
  source 1..120: mol_type = other DNA
tgcattcaaatcccagagttgaaccttcctttgatagttcagctttgaaacactctttttgtaggatctgcaggtggatatttggaccactctttggccttcgttcaaaacgagtacatc

SEQ ID NO: 121694 - DNA, 120 bp, synthetic construct
  source 1..120: mol_type = other DNA
acggagtggagcattcctattgacagagcagtttggaaacactcttgttgtagaatcggcgagtggagatttggagcgctttgaggcctatggtagtaaagggaagagcttcacataaaa

SEQ ID NO: 121695 - DNA, 120 bp, synthetic construct
  source 1..120: mol_type = other DNA
agctttgaaccactctttttctagaatctgcaagtggatatttggagggctttgaggcctgaggtggaaaaggaattatcttcccgtaagaactagatagatgcattctcagaaactact

SEQ ID NO: 121696 - DNA, 120 bp, synthetic construct
  source 1..120: mol_type = other DNA
gcattcaaatcccagagttgaaccttcctttgatagttcagctttgaaacattctttttgtaggttctgcaagtggatatttggacgactctttggccttcgttcgaaacgggtacatct

SEQ ID NO: 121697 - DNA, 120 bp, synthetic construct
  source 1..120: mol_type = other DNA
tactggagatttggagcgctttgaggcctatggtagtaaagggaagagcttcacataaaatctagacggaagcattctcagaaaatactttgtgatgattcagtttaacacacagagctg

SEQ ID NO: 121698 - DNA, 120 bp, synthetic construct
  source 1..120: mol_type = other DNA
aaacactctttctgtggcatctgcaagtggatgtttgggcctctttgaagatttcgttggaaacgggataatcttcacagaaaagctaaacagaagcatgctcagaaacttctttgtgat

SEQ ID NO: 121699 - DNA, 120 bp, synthetic construct
  source 1..120: mol_type = other DNA
ggaccactctgtggacttcgttcgaaacgggtatatcttcacataacatctagacagaagcattctcagaaacttttctgtgatgactgcattcaactcagagagttgaacactccttta

SEQ ID NO: 121700 - DNA, 120 bp, synthetic construct
  source 1..120: mol_type = other DNA
ttgaactttccttttgagagagaagctttgaaacactctttttctagaatctgcaagtggatatttggagggctttgaggcctgaggtggaaaaggaattatcttcccgtaagaactaga

SEQ ID NO: 121701 - DNA, 120 bp, synthetic construct
  source 1..120: mol_type = other DNA
tgtgatgtttgcattcaaatcccagagttgaaccttcctttgatagttcagctttgaaacactctttttgtaggatctgcaggtggatatttggaccactctttggccttcgttcgaaac

SEQ ID NO: 121702 - DNA, 120 bp, synthetic construct
  source 1..120: mol_type = other DNA
gaaacagcttcatataaaaactagacagcagcattctcagaaaactctttgtgacgactgagttaaactcacagggctgaacattcctttggatggagcagtttggaaacacactatctg

SEQ ID NO: 121703 - DNA, 120 bp, synthetic construct
  source 1..120: mol_type = other DNA
gcaagtggatatttggacctgtctgaggaattcgttgcaaacgggataatttcagctaagtaaacagaagcagtctcagaatcttcttgtgatgtttgcattcaaatcccagaattgaac

SEQ ID NO: 121704 - DNA, 120 bp, synthetic construct
  source 1..120: mol_type = other DNA
acactctttttgtaggatctgcaagtggatatttggaccactctttggccttcgttcgaaacgggtacatcttcaaataaaatctagacagaagccttctcagaaactgctctgtgacga

SEQ ID NO: 121705 - DNA, 120 bp, synthetic construct
  source 1..120: mol_type = other DNA
acacacgttctgtacaatctgcaagtggatatttggacctgtctgaggaattcgttgcaaacgggataatttcagctaagtaaacagaagcagtctcagaaacttcttgtgatgtttgca

SEQ ID NO: 121706 - DNA, 120 bp, synthetic construct
  source 1..120: mol_type = other DNA
tagttcaggtttgaaacactctttttgtaggatctgcaagtggatatttggaccacactttggccttcgtgcgaaacgggtacatcttcaaataaaatctagacagaagccttctcagaa

SEQ ID NO: 121707 - DNA, 120 bp, synthetic construct
  source 1..120: mol_type = other DNA
ttaactcacagggctgaacattcctttggatggagcagtttggaaacacactatctgtaggatctgcaagcggatacttgggcctccctgaggatttcgtgggaaacgggataaaccgca

SEQ ID NO: 121708 - DNA, 120 bp, synthetic construct
  source 1..120: mol_type = other DNA
ttttctagaatctgcaagtggatatttggagggctttgaggcctgaggtggaacaggaattatcttcccgtaagaactagatagatgcattctcagaaactactttgtgacgattgcatt

SEQ ID NO: 121709 - DNA, 120 bp, synthetic construct
  source 1..120: mol_type = other DNA
ttttgagagcgcagttttgaaactctctttctctggaatctgcaaggggacatgcagacctctttgaaggtttcgttggaaacggaatcatcttcacataaaaattacacagaagcatcc

SEQ ID NO: 121710 - DNA, 120 bp, synthetic construct
  source 1..120: mol_type = other DNA
aactcacagagtttcacgttgcttttcatagagcagatgagaaacatgcttttcgtagggtctgcaagtggacatttggagagctttcaggcctgtggtggaaaacgaattatcgtcacg

SEQ ID NO: 121711 - DNA, 120 bp, synthetic construct
  source 1..120: mol_type = other DNA
tttcagctaagtaaacagaagcagtctcagaatcttcttgtgatggttgcattcaaatcccagaattgaaccttcctttgaaagttcaggttggaaacactctttttgcaggatctacaa

SEQ ID NO: 121712 - DNA, 120 bp, synthetic construct
  source 1..120: mol_type = other DNA
cacactatctgtaggatctgcaagcggatacttgggcctctgtgaggatttcgttggaaacgggataaaccgcacagaactaaacagaagcattctcagaaccttcttcgtgatgtttgc

SEQ ID NO: 121713 - DNA, 120 bp, synthetic construct
  source 1..120: mol_type = other DNA
aaagtggatatttggaccactctttggccttcgttcgaaacgggtacatcttcaaatgaaatctagacagaagccttctcagaaacttctctgtgacgattgcattcaactcaaagcgtt

SEQ ID NO: 121714 - DNA, 120 bp, synthetic construct
  source 1..120: mol_type = other DNA
ttcctttggatggagcagtttggaaacacactatctgtaagatctgcaagcggatacttgggcctctctgaggattttgttggaaacgggataaaccgcacagaactaaacagaaagcat

SEQ ID NO: 121715 - DNA, 120 bp, synthetic construct
  source 1..120: mol_type = other DNA
tcggctagtggagatttggagcgctttgaggcctatggtagtaaagggaagagcttcacatacaatctagacagaagcattttcagaaaatactttgtgatgattgagtttaacacacag

SEQ ID NO: 121716 - DNA, 120 bp, synthetic construct
  source 1..120: mol_type = other DNA
ctagatagatgcattctcagaaactactttgtgacgattgcattcaagtcacagacgtgaacattccctttcacagagcactttggaaactctcgttgtgtagaatctgcaagtggagtt

SEQ ID NO: 121717 - DNA, 120 bp, synthetic construct
  source 1..120: mol_type = other DNA
aaggtttcgtttggaaacggaatcatcttcacataaaaattacacagaagcatcctcaggaactccttggtgatgtgtgtattcaacttccagagttgaactttccttcggaaagagcag

SEQ ID NO: 121718 - DNA, 120 bp, synthetic construct
  source 1..120: mol_type = other DNA
gaatctgcaagtggatatgtggtcctctttgaagatgtctttggaaacgggaatatcttcacataaaaactaaacagaagcattctcagaaacttctctgtgatgtttgtgtccaactca

SEQ ID NO: 121719 - DNA, 120 bp, synthetic construct
  source 1..120: mol_type = other DNA
ttcaacttccagagttgaactttccttcggaaagagcagctataaaacacactttttctagaatctgcaagtggacattgggagggctgtgaggtttgtgatggaaaaggaaatatctcc

SEQ ID NO: 121720 - DNA, 120 bp, synthetic construct
  source 1..120: mol_type = other DNA
agaaaagctaaacagaagcattctcagaaacttccttgtgatgtttgctttcaactcacagagttgaactttccttttgagagagaagctttgaaacactctttttctagaacctgcaag

SEQ ID NO: 121721 - DNA, 120 bp, synthetic construct
  source 1..120: mol_type = other DNA
tctttgtgatgtttgcattcaaatcccagagttgaaccttcctttgatagtccagctttgaaacactctttttgtaggatctgcaggtggatatttggaccactctttggccttcgttcg

SEQ ID NO: 121722 - DNA, 120 bp, synthetic construct
  source 1..120: mol_type = other DNA
ctgaggaattcgttgcaaacgggataatttcagataagtaaacagaagcagtctcagaatcttcttgtgatgtttgcattcaaatcccagaactgaaccttcctttgaaagttcaggttg

SEQ ID NO: 121723 - DNA, 120 bp, synthetic construct
  source 1..120: mol_type = other DNA
gcattcaaatcccagagttgaaccttcctttgatagttcagctttgaaacactctttttggaggttctgcaggtggatatttggacccctctttggccttcgttcgaaacgggtacatct

SEQ ID NO: 121724 - DNA, 120 bp, synthetic construct
  source 1..120: mol_type = other DNA
tcaacttctgaacgactcccttgctgggagtcaggttctcagttattattacaaagtttaataatggaaccgttccatatgcataaaggaccaagagaaaggaatgggaaggctagggaa

SEQ ID NO: 121725 - DNA, 120 bp, synthetic construct
  source 1..120: mol_type = other DNA
ttaccaaagggaaaagttattttttatttttttatgagacaaggtctcactctgtcacctaggctgaagtacagtgacaaaatcatagctaactgcagcctcgaccccctgggctcaagt

SEQ ID NO: 121726 - DNA, 120 bp, synthetic construct
  source 1..120: mol_type = other DNA
tgaagtctgtgagttgggggtatgatgtatagagttttagattaaaactgcatccaataagttggcctgataaatctttcaaacctacagaggaataatcacaagtgactcgtattcctt

SEQ ID NO: 121727 - DNA, 120 bp, synthetic construct
  source 1..120: mol_type = other DNA
tttacaaaattcgggcatacatttcagtttgccctgaaccgtgcccaaggctgtgtgctcatctctgccagggtgtctgtgcccttcatgtactgccgaccacgagggtgcagagcagag

SEQ ID NO: 121728 - DNA, 120 bp, synthetic construct
  source 1..120: mol_type = other DNA
ggtgggaggcttatcggggtgggtggggacgcttgtttacactagcgcttacccctaacggtgacggctcccttcctcactccatggcgccggccttcttcccgctccccaactcctcac

SEQ ID NO: 121729 - DNA, 120 bp, synthetic construct
  source 1..120: mol_type = other DNA
tggtatgcctagaataaaggtggttgggattagaattgggtgacactgatcagtagtttaaattcagaggtatctcttcccgactcaaaagtctcactttgggctgaaagtatacaggaa

SEQ ID NO: 121730 - DNA, 120 bp, synthetic construct
  source 1..120: mol_type = other DNA
gcagaacaaatgctcaaatgctttcaagagtttttctgtagattaggtttattagcaccaacttcatgacttctaaaatgtgactgcttgaatacaggtatctaccagtgatatggggtg

SEQ ID NO: 121731 - DNA, 120 bp, synthetic construct
  source 1..120: mol_type = other DNA
aattggaaaaaactactttcaagttcatatggaaccaaaaaagagcccgcatcaccaagtcaatcctaagccaaaagaacaaagctggaggcatcacactacctgacttcaaactatact

SEQ ID NO: 121732 - DNA, 120 bp, synthetic construct
  source 1..120: mol_type = other DNA
gactgtaaactagttcatccattgtggaagtcagtgtggcgattcctcagggatctagaactagaaataccatttgacccagccatcccattactgggtatatacccaaatgactataaa

SEQ ID NO: 121733 - DNA, 120 bp, synthetic construct
  source 1..120: mol_type = other DNA
cttttaaaaattatttttattattttttgcagagatgaggtcttgctgtgttgcccaagctgttctcaaactcttggcctcaagagatcctcctgccttggcctcccaaagtgctgggat

SEQ ID NO: 121734 - DNA, 120 bp, synthetic construct
  source 1..120: mol_type = other DNA
tgctgggattacaggcgtgagccaccgcgcccggcccatactgattttgaaatttaaaaaatctacattctatattcgcatcatagcttctccctaataaaatctttgtgagtgtttatg

SEQ ID NO: 121735 - DNA, 120 bp, synthetic construct
  source 1..120: mol_type = other DNA
gagagtttcctttctacattgtgcctttttttttttttacagtacagtgaaagcaagtctattaagaaagtaaaggaataaaagaatctacattgtatatccttgatggccttgtcaaag

SEQ ID NO: 121736 - DNA, 120 bp, synthetic construct
  source 1..120: mol_type = other DNA
ggaggcagaggttgcagtgagccaagatatcacaccactgcactccagcctgaacaacagagtgagactctgtctacaaaagaatataatgaaaaaagataagtaaaaatcaacaccaca

SEQ ID NO: 121737 - DNA, 120 bp, synthetic construct
  source 1..120: mol_type = other DNA
ctgggccactgcactccagctaggcgacagagtgagactctgtctcaacaaaaaggaaaaaaaataagtaattttaaaaacagaagacatgcgagaccaaaggctaaaagcaacaaacga

SEQ ID NO: 121738 - DNA, 120 bp, synthetic construct
  source 1..120: mol_type = other DNA
ggcggaggttgcagtgagctgagatcacgccattgcacttcagcctgggcaacaagaacgaaagtttgtctcaaaaaagaagaaaaaaaaattcagcggaacaaatatccaaaccatatc

SEQ ID NO: 121739 - DNA, 120 bp, synthetic construct
  source 1..120: mol_type = other DNA
cgcttgaacccgggaggcagaggttgcagtgagccaagatcgcatcattgcactccagcctaaacaacaacagagaaactctgtctcaaaaaaaaaaaattatttgttgttacatgaaaa

SEQ ID NO: 121740 - DNA, 120 bp, synthetic construct
  source 1..120: mol_type = other DNA
ccaaccccagggtttctgcatctgcttgcaaagtctccagatatctaaacactttatgtcattcaggcctctgctcaaatcactttttttttttttttttgagacagggtctcactctgt

SEQ ID NO: 121741 - DNA, 120 bp, synthetic construct
  source 1..120: mol_type = other DNA
actaatgttatgtgaatagagacatggctagggataaaatttccagtcacaacataatatactgattcaaataaggatctatctcaaacctcttagaagataatatttgctctggaactg

SEQ ID NO: 121742 - DNA, 120 bp, synthetic construct
  source 1..120: mol_type = other DNA
acacttttcagggccgggagcagtggctcacgcctgtaataccagcacttctggaggccaaggagggcggatcacgaggtcaagagatcgagaccatcctggccaacatggtgaaacccc

SEQ ID NO: 121743 - DNA, 120 bp, synthetic construct
  source 1..120: mol_type = other DNA
ttaactaaagttggtatttcactaggacgatttagcagatgaaatgggttttaagtttagaacaccatttcttcttccttattacatttccctttttaatgttagccctctacaaacaca

SEQ ID NO: 121744 - DNA, 120 bp, synthetic construct
  source 1..120: mol_type = other DNA
ctgtgcaacttctttcctcccaagtacagggcaggatgccttctgaaatgggggtcttatgacctccaatcagacaaggtaggtcagataatttctttgctgtcagctccaagacagaat

SEQ ID NO: 121745 - DNA, 120 bp, synthetic construct
  source 1..120: mol_type = other DNA
gaaactcagaatgtattttcctccaagccactgctatacttaaacaagtaatctaaaccacataattctatatagcccacatataccagtgtagctcagtactagatcaaacacattgtg

SEQ ID NO: 121746 - DNA, 120 bp, synthetic construct
  source 1..120: mol_type = other DNA
attagtaaccaacggggaacaaaacaaagctcccctagatactagcaaactattcatatacctgcttactatgttcaaaaatataaaatcccaatcctgaaaaatttggcaagtaacgcg

SEQ ID NO: 121747 - DNA, 120 bp, synthetic construct
  source 1..120: mol_type = other DNA
ggccgggcatggtggctcacgcctagaataccagcacttcgggaggccaaagcaggcagatcacctgaggacaggagttcaagaccagcttggccaacatggtgaaaccccgtctctaca

SEQ ID NO: 121748 - DNA, 120 bp, synthetic construct
  source 1..120: mol_type = other DNA
atataatagaaagaaggactgaaaagtaataagccaaacatccatctcaagacttctgtttgttttttgtttttttttaagggcagtcaagtgaagcagtgggagtgaaggaggaataaa

SEQ ID NO: 121749 - DNA, 120 bp, synthetic construct
  source 1..120: mol_type = other DNA
agaggcaagagaactgcttgaacccgggaggcagaggttgtagtgagccgaggtcacgccagcacaagactccatttcaaaaaaaaaaaaaaagtaaaacagaaggcacaaataaataaa

SEQ ID NO: 121750 - DNA, 120 bp, synthetic construct
  source 1..120: mol_type = other DNA
cacctgtaatcccagcactttgggaggccgaggcgggcagatcacgaggtcagaagatggagaccattctggctaacacggtgaaaccccgtctctactaaaaacacaaaaaattagccg

SEQ ID NO: 121751 - DNA, 120 bp, synthetic construct
  source 1..120: mol_type = other DNA
atcctgcatagaaaccagaatatacttcacagataagcatagaaatccaaacaagggccaggcacagtggctcatatctgtaatcccagcactttgggaagctgaggtaggaggactgct

SEQ ID NO: 121752 - DNA, 120 bp, synthetic construct
  source 1..120: mol_type = other DNA
gccaccatataatgtaggttttggaactagtatttaaatggaagagtatatcttcagagtaaagttccattgagaaatagaaaagtctgtaaaaccaggtctcgtcttataacaagaaac

SEQ ID NO: 121753 - DNA, 120 bp, synthetic construct
  source 1..120: mol_type = other DNA
cctttttcttcaaataaaaacttacacaaagaagcaacaattggccaggcacggtggctcacacctttaatcccagcactttgggaggccgaggcgggcggatcacaaggtcaggagatc

SEQ ID NO: 121754 - DNA, 120 bp, synthetic construct
  source 1..120: mol_type = other DNA
accccagaggtggaggttgcagcaagctgagatcgttgggcgacagagctagactccatctcaaaaaaaaaaaaaaagaacttttcagtcacctgaattctatcccgacatttttagtac

SEQ ID NO: 121755 - DNA, 120 bp, synthetic construct
  source 1..120: mol_type = other DNA
cccacctgggcctcccaaagtgctgggattacaggcgtgagccactgcgcccggccttaaattattttttattaaagaagtctcagagtaaccaataaccattttgacaaggaatgtcta

SEQ ID NO: 121756 - DNA, 120 bp, synthetic construct
  source 1..120: mol_type = other DNA
tgagccgagatcgcgccactgcactccaggctgggggacagagcgagaccccgtctcaaaaaaaaataaaaaataaaataaaataaaataaaataaaacagttctcattttatagacact

SEQ ID NO: 121757 - DNA, 120 bp, synthetic construct
  source 1..120: mol_type = other DNA
ttggccaggtgtgttggcacacacctgtaatcccagcactttgggaggctaagcaaagaggatcgcttgagcccaggagtttgagaccagcctggaaaacatggcgaaaccctatctcta

SEQ ID NO: 121758 - DNA, 120 bp, synthetic construct
  source 1..120: mol_type = other DNA
ggcaggagaatcacttgaacccaggaggtgagcttgcaatgggccgagatcgcaccattgcactgcagcctgggcgacagagtgagcctacgtctcaaaaaaaaaaaaaagaatacaaaa

SEQ ID NO: 121759 - DNA, 120 bp, synthetic construct
  source 1..120: mol_type = other DNA
ctagcatcttggtccatgttttcctgtgcacacatgagagaatttttccatggaaaggaacctaatagtggactttctggattgttggacataaatcttcaactttaccaagaactgcca

SEQ ID NO: 121760 - DNA, 120 bp, synthetic construct
  source 1..120: mol_type = other DNA
caccacgcctggcctcttgtgcatttttcaatttagtcataaccttgcttaaaacaaaacttcaaattcatttccagacatttgaatgttctaaatctaaaataacaaaaacacagatgc

SEQ ID NO: 121761 - DNA, 120 bp, synthetic construct
  source 1..120: mol_type = other DNA
tgtaacacataaagtgaaactactttggcttacaaaaaaaatgcttctcataagtcttcatgtttcaaaacaaagacgtcatttaatgaatggcttatcttttaagcagcaatattcctt

SEQ ID NO: 121762 - DNA, 120 bp, synthetic construct
  source 1..120: mol_type = other DNA
aggatactaccatttctggaagggtgggagggaggaaccaaaggaacaaaggtacttatcttaaaaatagaaatccattcacattttaaaaattggtcagcatcttgtcttatattagag

SEQ ID NO: 121763 - DNA, 120 bp, synthetic construct
  source 1..120: mol_type = other DNA
gattacaagtgaccaaataaaccaagaaccacatacttgtatggtgttcaaaacaaaatcactaaaatctagagaactaatctcagttaacaacaaaagccatccgaaggctcagttatt

SEQ ID NO: 121764 - DNA, 120 bp, synthetic construct
  source 1..120: mol_type = other DNA
gcggatcacctgaggtcgggtgtttgagaccagcctagctaacatggtgaaacctggtctctacagaaatacaaaaattagccaggtgtggtggcatgcacctgtaatcccagctactag

SEQ ID NO: 121765 - DNA, 120 bp, synthetic construct
  source 1..120: mol_type = other DNA
ggctggcagcagctagtttcacagcagcttggctggcagcagctagagtcacaagtcccaccggttgagaagctaggaaatccacagaagctggtctggcagcagcttggctggcagcag

SEQ ID NO: 121766 - DNA, 120 bp, synthetic construct; identical to SEQ ID NO: 35789
  source 1..120: mol_type = other DNA

SEQ ID NO: 121767 - DNA, 120 bp, synthetic construct; identical to SEQ ID NO: 35790
  source 1..120: mol_type = other DNA

SEQ ID NO: 121768 - DNA, 120 bp, synthetic construct; identical to SEQ ID NO: 35791
  source 1..120: mol_type = other DNA

SEQ ID NO: 121769 - DNA, 120 bp, synthetic construct
  source 1..120: mol_type = other DNA
aggagggtttatctgttctatacccagagtacccaatagaatgtcttggatgcatattattgaaggcttaataattctaaatattgtttacatataacaaatgcttttgtcaatgaaaat

SEQ ID NO: 121770 - DNA, 120 bp, synthetic construct; identical to SEQ ID NO: 35792
  source 1..120: mol_type = other DNA

SEQ ID NO: 121771 - DNA, 120 bp, synthetic construct; identical to SEQ ID NO: 35793
  source 1..120: mol_type = other DNA

SEQ ID NO: 121772 - DNA, 120 bp, synthetic construct; identical to SEQ ID NO: 35794
  source 1..120: mol_type = other DNA

SEQ ID NO: 121773 - DNA, 120 bp, synthetic construct
  source 1..120: mol_type = other DNA
gattaagttttccacgaggtaaataataaggaaataatgacgtggtggcaatgggccttcagcagggtataaaggaggctatggacccagaagacttccaaacccaagaacttcactctc

SEQ ID NO: 121774 - DNA, 120 bp, synthetic construct; identical to SEQ ID NO: 35795
  source 1..120: mol_type = other DNA

SEQ ID NO: 121775 - DNA, 120 bp, synthetic construct; identical to SEQ ID NO: 35796
  source 1..120: mol_type = other DNA

SEQ ID NO: 121776 - DNA, 120 bp, synthetic construct; identical to SEQ ID NO: 35797
  source 1..120: mol_type = other DNA

SEQ ID NO: 121777 - DNA, 120 bp, synthetic construct; identical to SEQ ID NO: 35798
  source 1..120: mol_type = other DNA

SEQ ID NO: 121778 - DNA, 120 bp, synthetic construct
  source 1..120: mol_type = other DNA
ccctgtgatgctgtgcttcagtggtcacgctccttgttcactttcatgttcagcctgtacacctggctcctccttttaagttcttagaagacagcagtagcagaactagtaggagtacca

SEQ ID NO: 121779 - DNA, 120 bp, synthetic construct
  source 1..120: mol_type = other DNA
gggttcaagcaattcccctgcctcatcctcccaagcattgggactacaggtatgtgccaccacgctcggctaagtttgtatttttaaaagtatgggggggggccacgttggcttgctgtt

SEQ ID NO: 121780 - DNA, 120 bp, synthetic construct
  source 1..120: mol_type = other DNA
ccactgagaagcttcatcaggtggcctgtcctggagatgagcttggcacaggtcacttgcacatgggccccagagcagtccatcttcaaggtccggataacatgagaaatgagccttctc

SEQ ID NO: 121781 - DNA, 120 bp, synthetic construct
  source 1..120: mol_type = other DNA
gagtgtttcaaaattcctgtggacatcttattactcagcttttcctattaagcttttcgattaggctttttttccccaaactgttattcattgccgaatacagttgccatgttaaaacac

SEQ ID NO: 121782 - DNA, 120 bp, synthetic construct
  source 1..120: mol_type = other DNA
ttggccatccaaagtgctgagattacaggcataagctgttatgcccagctcattatatacctttcattacaaataaacagtggtcactaagtgatccacataaacatcagcacaaccccc

SEQ ID NO: 121783 - DNA, 120 bp, synthetic construct
  source 1..120: mol_type = other DNA
gccacttcgctgtaatgcctcgctcctacaaaaggaaaaaaacccaaaaattccccaaaatgttctgtgggtttctcaggtaatttactttgtctccccaaaacagctagaaattaccta

SEQ ID NO: 121784 - DNA, 120 bp, synthetic construct
  source 1..120: mol_type = other DNA
tttggcaaatcttcctggtagaggctgggggctcatccctgctatctgttctagcttggtagagccaggttaagacatctgggcaagaagagagtagagtgtaccccaggaagcgtgggt

SEQ ID NO: 121785 - DNA, 120 bp, synthetic construct
  source 1..120: mol_type = other DNA
cataaaacctttgactactgcccttcctcaccgcatttttgttgtctcttctggtgaaccatgatgtcttgtctattgccttcctgggctcaaggatccatcaaaaactgatgcttcttt

SEQ ID NO: 121786 - DNA, 120 bp, synthetic construct
  source 1..120: mol_type = other DNA
tacagtgaaataatagaaatgaagcacacaataaatgtaatgggcttgaatcatctccacatcatcccttccccttctcccgggtccgtggaagaattgtcttcaagaaaactggtctca

SEQ ID NO: 121787 - DNA, 120 bp, synthetic construct
  source 1..120: mol_type = other DNA
tacacatttaggtccccaagtcaactcagactctgccctgtgaaactaaaaataaagcaacactgaagtgtaggatgcacagaaggaaggaagtctaagaagttctgatttttcatggct

SEQ ID NO: 121788 - DNA, 120 bp, synthetic construct
  source 1..120: mol_type = other DNA
aaatgaccacaaacttagaggcttagagcaacacacttactatctcaccgctctgcaggttagaagtctgacagtggtctccctgggctaatgtcaaggtgtcggcagggctgcgtttct

SEQ ID NO: 121789 - DNA, 120 bp, synthetic construct
  source 1..120: mol_type = other DNA
tctcaagccatcctcctgctttagcctcccaaattgctgggatgacaggtgtgaggcactgtgcccagactaaattattgtaatattacagctattatggattcggtttctaaataacat

SEQ ID NO: 121790 - DNA, 120 bp, synthetic construct
  source 1..120: mol_type = other DNA
ttaaggttgttaattagctgactaattagggagattatcctagactgtctgggtggcccaatgtggtcacagggttcttaaaagcagaagaaaggacagagaagagaagagtgagatgtc

SEQ ID NO: 121791 - DNA, 120 bp, synthetic construct
  source 1..120: mol_type = other DNA
gtgcaatctcccctcccacaaacatcctggcccagggcagctgttagggggcctctgtcaggacagactttctctcctcgccatcctgaaagccaggtggctcaccttcctctgagcctc

SEQ ID NO: 121792 - DNA, 120 bp, synthetic construct
  source 1..120: mol_type = other DNA
ggctgcagtgagccatgatcatgccactgcactccagtctgggcaacagactgaaaccgtttctcaaaattaaaaaaacaaaacaaaacaaaacaaaaaaaacgggcaaggatgtaagag

SEQ ID NO: 121793 - DNA, 120 bp, synthetic construct
  source 1..120: mol_type = other DNA
gccaagttctcccaggataagggcaggaaacagggctccttgcccttcttgttgcttgagtgacaaccctggggtcatccctaggccccgtcactgcccctgcttctaaactgagaacat

SEQ ID NO: 121794 - DNA, 120 bp, synthetic construct
  source 1..120: mol_type = other DNA
aaaagaagtcacatgttccaagcaattttaaaatccagctgggcaaataccacaagaatccagtttctggaaataaacctccatagcttgagtatttgccttttgggcctgtggctctgc

SEQ ID NO: 121795 - DNA, 120 bp, synthetic construct
  source 1..120: mol_type = other DNA
tgttgtttcctgactttttaatgattgccattctaactggtgtgagatgatatctcatagtggttttgatttgcatttctctgatggccagtgatgatgagcatttcttcatgtgtattt

SEQ ID NO: 121796 - DNA, 120 bp, synthetic construct
  source 1..120: mol_type = other DNA
gatggcattgaatctgtaaattaccttgggcagtatggccattttcacgatattgattcttcctacccatgagcatggaatgttcttccatttgtttgtgtcctcttttatttccttgag

SEQ ID NO: 121797 - DNA, 120 bp, synthetic construct
  source 1..120: mol_type = other DNA
atctgtctaatgttgacagtggggtgttaatgtctcccattattaatgtgtgggagtctaagtctctttgtaggtcactcaggacttgctttatgaatctgggtgctcctgtattgggtg

SEQ ID NO: 121798 - DNA, 120 bp, synthetic construct
  source 1..120: mol_type = other DNA
agggacatggtggagaggatggacgtggtggaggggagggacgcggtggagagggatggacgtggtggaggggagggacacagtggaaaggatggacacagtggagaggagggacatggt

SEQ ID NO: 121799 - DNA, 120 bp, synthetic construct
  source 1..120: mol_type = other DNA
ggtctgctcactccttgatgagcttaccttcctcgatcaccccaacatgcagagagaaaccctttgcccttcttggagggaggggtcagatgctcactctgcagatccctgaagacaagc

SEQ ID NO: 121800 - DNA, 120 bp, synthetic construct; identical to SEQ ID NO: 69930
  source 1..120: mol_type = other DNA

SEQ ID NO: 121801 - DNA, 120 bp, synthetic construct; identical to SEQ ID NO: 69931
  source 1..120: mol_type = other DNA

SEQ ID NO: 121802 - DNA, 120 bp, synthetic construct
  source 1..120: mol_type = other DNA
aggttcttctcttacttcccaccctctttcctgttcgtcagcgcctagatcctgcagtagtctgccctgcagtctgcgctttcagacctccggaccctcctcggacctcggccagacctc

SEQ ID NO: 121803 - DNA, 120 bp, synthetic construct
  source 1..120: mol_type = other DNA
aggcacgttgcgctctcctcccttgccgcgtttaatgtctcccagttgaccactccgcttctgctctcccctccctctgttaggggtcgtcgcgcttctccgatttctccacgaactttg

SEQ ID NO: 121804 - DNA, 120 bp, synthetic construct
  source 1..120: mol_type = other DNA
caagcggacctaatagacatctacagaactctccaccccaaatcaacagaatatacatttttttcagcaccacaccacacctattccaaaattgaccacatagttggaagtaaagctctc

SEQ ID NO: 121805 - DNA, 120 bp, synthetic construct
  source 1..120: mol_type = other DNA
tcaagagaaatgcaaatcaaaaccactatgagatatcatctcacaccagttagaatggcaatcattaaaaagtcaggaaacaacaggtgctggagaggatgtggagaaataggaacactt

SEQ ID NO: 121806 - DNA, 120 bp, synthetic construct
  source 1..120: mol_type = other DNA
acatctacaccgaaaacccatctgtacagcaccatcatcaaagaccaaaagtagataaaaccacaaagatggggaaaaaacagaacagaaaaactggaaactctaaaacgcagagcgcct

SEQ ID NO: 121807 - DNA, 120 bp, synthetic construct
  source 1..120: mol_type = other DNA
attgcagaatttagtccatttatatttaaagttaatattgttatgtgtgaatttgatcctgtcattatgatgttagctggtgattttgctcattagttgatgcagtttcttcctagtctc

SEQ ID NO: 121808 - DNA, 120 bp, synthetic construct
  source 1..120: mol_type = other DNA
tgggtcaactgcagctcgttggaggtgtggatcaaggacatagggtctttgctccttcactagtccaagggtagcaagggcagttccactgcagaggcagtggcagagaggctttcagtt

SEQ ID NO: 121809 - DNA, 120 bp, synthetic construct
  source 1..120: mol_type = other DNA
acagcactacgtttttttgaaaaaccagtctgtgcatcgttctgttgagcagctgtgttgtgctgtgctgtgctgtgctgtgctgtgctgtgctgtgctgtgctgggggtctgcttccgt

SEQ ID NO: 121810 - DNA, 120 bp, synthetic construct
  source 1..120: mol_type = other DNA
tactttttttttaagcattgagagatggactggcctcctctttctgggtcaactgcagcctgctggaggtgtggataaggcaggtagggtctttgctgcttcattagtccaaaggtagca

SEQ ID NO: 121811 - DNA, 120 bp, synthetic construct
  source 1..120: mol_type = other DNA
acctcagcctcccaaagtgctgggattaccggcgtaagcaattgtgcctgtttttagaaaacagcactacgtttttttgaaaaaccagtctgtgcatcgttctgttgagcagctgtgttg

SEQ ID NO: 121812 - DNA, 120 bp, synthetic construct
  source 1..120: mol_type = other DNA
tttatgttccttccccaacttggaggcacagagaaagggaccttagtagtggctgtggccaagggtctttcgcgtgtctcctgggggctccacccatagagatgcaggtcagcattcact

SEQ ID NO: 121813 - DNA, 120 bp, synthetic construct
  source 1..120: mol_type = other DNA
catgtcgtctgcaaacagggacaatttgacttcctcttttcctaattgaataccctttatttccttctcctgcctgactgccctggccagaacttccaacactatgttgaataggagcgg

SEQ ID NO: 121814 - DNA, 120 bp, synthetic construct
  source 1..120: mol_type = other DNA
gattctggtatgtggtgtctttgttctcgttggtttcaaagaacatctttatttctgccttcatttcgttatgtacccagtagtcattcaggagcaggttgttcagtttccatgtagttg

SEQ ID NO: 121815 - DNA, 120 bp, synthetic construct
  source 1..120: mol_type = other DNA
cctgaatctgaacgttggcctgccttgctagattggggaagttctcctggataatatcctgcagagtgttttccaacttggttccattctccgcatcactttcaggtacaccaattagac

SEQ ID NO: 121816 - DNA, 120 bp, synthetic construct
  source 1..120: mol_type = other DNA
gttctgagcagccaagtgacatcatctgtctccctatttaaaagcacccctggctgctgagttgggaaagactataggaagattttggtagaagcagggaggccgagctgttaccacatc

SEQ ID NO: 121817 - DNA, 120 bp, synthetic construct
  source 1..120: mol_type = other DNA
gatatttggatagctttgagggttacgttggaaacgggattacatatacaaagtagacagcagcattctcagaagcttcgtcatgatgtttgcgtttaagtcacagagttgaacgttccc

SEQ ID NO: 121818 - DNA, 120 bp, synthetic construct
  source 1..120: mol_type = other DNA
ttcggatagctctgaggatttcgttggagacgggaatacataaagaaagtagacagcagcattctcgggagattctttgtgatgtttgcttttaagtcacagagttgaatattcccttca

SEQ ID NO: 121819 - DNA, 120 bp, synthetic construct
  source 1..120: mol_type = other DNA
agagttgaacatttctattcacagagcagttttgaaagactcttttggagtatctgctagtggatatttggagagtttaaggatttcattggaaaccggaatatcttcaggtaaaatcta

SEQ ID NO: 121820 - DNA, 120 bp, synthetic construct
  source 1..120: mol_type = other DNA
actactttgtgatatctgcattgatatcagagagttgaatattccctttctaagggcaggcttgaaagcgtcttttcgtggaatctgcaggaggatatttggatagcttggagggttacg

SEQ ID NO: 121821 - DNA, 120 bp, synthetic construct
  source 1..120: mol_type = other DNA
cattcaagccacagagttgaacatttcccttcctaaagcaggtttgaaacactcgttttgtcgtatctggaagtggacatttggagcactttgacgcctttggtgaaaaaggaaatgtct

SEQ ID NO: 121822 - DNA, 120 bp, synthetic construct
  source 1..120: mol_type = other DNA
ttggagcgcttggacgcttatggtgaaaaaggacagatcgtcccataaaaactggacagaagcattctcacaaactgctttgtgacgtatgtcttcaactaacagagttgaacatttcta

SEQ ID NO: 121823 - DNA, 120 bp, synthetic construct
  source 1..120: mol_type = other DNA
aaggaaataccttaacataaaaactagacagaagcattctcagaaacgtctttgtgatgtgtgtcctcaactaacagagttcaacctttcttatgatacagcagtttggaaacactcttt

SEQ ID NO: 121824 - DNA, 120 bp, synthetic construct
  source 1..120: mol_type = other DNA
ggctttgtggatttcgttggaaacgggagtatcttcatagaaaacctagacagtaacattctcagaaacggctttgtgatatccgcattcacgtcacagagttgaacattccctttcata

SEQ ID NO: 121825 - DNA, 120 bp, synthetic construct
  source 1..120: mol_type = other DNA
acggatttgaacatttcgtttgacagagcagttcggaaacacgatttttgtagaatcttcaagtggatatttggatggctttgtggatttcgttggaaacgggagtatcttcatagacaa

SEQ ID NO: 121826 - DNA, 120 bp, synthetic construct
  source 1..120: mol_type = other DNA
acataaagaaagtagacagcagcattctcaggagattctttgtgatgtttgctttgaagtcacagagttgaatattcccttcaatagagcaggtttgaaacactctttccgtagtatctg

SEQ ID NO: 121827 - DNA, 120 bp, synthetic construct
  source 1..120: mol_type = other DNA
cactttctgtagtatctggatgtgggcacttggagcgcttggacgcttatggtgaaaaaggacatatcatcccataaaaactggacagaagcattctcacaaactgctttgtgacgtatg

SEQ ID NO: 121828 - DNA, 120 bp, synthetic construct
  source 1..120: mol_type = other DNA
ttgtgatgtttgcttttaagtcacagagttgaatattcccttcaatagagcaggtttgaaacactccttctgtagtatctggaagtggacatttttatcgattacaggcctatgttgaaa

SEQ ID NO: 121829 - DNA, 120 bp, synthetic construct
  source 1..120: mol_type = other DNA
aacattccctttcatagagcaggtttgaaacaccctttctgaagtatctggatatgggcacttggagctcttgaacgtttatggtgaaaaaggaaatatcgtcccataaaacctagacag

SEQ ID NO: 121830 - DNA, 120 bp, synthetic construct
  source 1..120: mol_type = other DNA
tcatgatgtttgcgtttaagtcacagagttgaacgttccctttcatagagcaggtttcaaaccctctttctgcagtatctggaagtggacatttcgagcgctttcaggcctatggtgaac

SEQ ID NO: 121831 - DNA, 120 bp, synthetic construct
  source 1..120: mol_type = other DNA
ctttgacacctttggtgaaaaaggaaatgtcttcccgtcaaaactagacagaagcattctaagaaacatttttgggatatatgtactcaactaacagagttgaacctttctctttataga

SEQ ID NO: 121832 - DNA, 120 bp, synthetic construct
  source 1..120: mol_type = other DNA
agcagacagcagcattctcagaagctgctttatgatgtttgctatcaagtcacagagttgaacgttccctttcatagagcaggtttcaaaccctctttctgcagtatctggaagtggaca

SEQ ID NO: 121833 - DNA, 120 bp, synthetic construct
  source 1..120: mol_type = other DNA
cttcatataaaatctagacagtggcactctcagaaactgctttgtgatatctgcattcaagccacagagttgaacatttcccttcctaaagcaggtttgaaacactctttctgtcgtatc

SEQ ID NO: 121834 - DNA, 120 bp, synthetic construct
  source 1..120: mol_type = other DNA
agtgggtatttggatggctttgtggatttcgttggaaacgggagtatcttcatagaaaacctagacagtaacatgctcagaaactgctttgtgatatctgcattcacgtcacagagttga

SEQ ID NO: 121835 - DNA, 120 bp, synthetic construct
  source 1..120: mol_type = other DNA
gttgaatattcccttcaatagagcaggtttgaaacactctttctgtagtatctggaagtggccatttcgatcgatttcaggcgtatgttgaaaaaggaaatatcttaacataaaaactag

SEQ ID NO: 121836 - DNA, 120 bp, synthetic construct
  source 1..120: mol_type = other DNA
gtacaaagcagacagcagcattctcagaagcttctttatgatgtttgcgttcaagtcacagagttgaacgttccctttcatagagcaggtttcaaaccctctttctgcagtatctggaag

SEQ ID NO: 121837 - DNA, 120 bp, synthetic construct
  source 1..120: mol_type = other DNA
aaaggaaatgtcttcccatgaaaactagacagaagcattctaagaaacatttttgggatatatgtactcaactaacagagttgaacctttctctttatagatcagttttggaaagctctt

SEQ ID NO: 121838 - DNA, 120 bp, synthetic construct
  source 1..120: mol_type = other DNA
cattcacgtcacagagttgaacattccctttcatagagcaggtttgaaacacactttctgtagtatctggatgtgggcacttggagctcttggacgcttatggtgaaaaaggacatatcg

SEQ ID NO: 121839 - DNA, 120 bp, synthetic construct
  source 1..120: mol_type = other DNA
ggtttgaaacactctttctgtagtatctggaagtggacatttcgatcgatttcaggcctatgttgaaaaaggaaataccttaacataaaaactagacagaagcattctcagaaacgtctt

SEQ ID NO: 121840 - DNA, 120 bp, synthetic construct
  source 1..120: mol_type = other DNA
gacgcttatggtgaaaaaggacagatcgtcccataaaaactggacagaagcattctcacaaactgctttgtgacgtatgtcgtcagctaacagagttgagcatttctattcacagagcag

SEQ ID NO: 121841 - DNA, 120 bp, synthetic construct
  source 1..120: mol_type = other DNA
ggaatatcttcatataaaacctaggcagaagcactctgagaaactactttgtgatatctgcattgatatcagagagttgaatattccctttctaagggcaggcttgaaagcgtcttttcg

SEQ ID NO: 121842 - DNA, 120 bp, synthetic construct
  source 1..120: mol_type = other DNA
gtggatagttggatagctctaacgatttcgttggaaacgggaataccttcatataaaatctagacagtggcactctcagaaactgctttgtgatatctgcattcaagccacagagttgaa

SEQ ID NO: 121843 - DNA, 120 bp, synthetic construct
  source 1..120: mol_type = other DNA
aaacgggattacatgtacaaagcagacagcagcattctcagaagctgctttatgatgtttgctttcaagtcacagagttgaacgttccctttcatagagcaggtttcaaaccctctttct

SEQ ID NO: 121844 - DNA, 120 bp, synthetic construct
  source 1..120: mol_type = other DNA
atagctctaacgatttcgttggaaacgggaataccttcatataaaatctagacagtggcactctcagaaactgctttgtgatatctgcattcaagccacagaattgaacaattcctttcc

SEQ ID NO: 121845 - DNA, 120 bp, synthetic construct
  source 1..120: mol_type = other DNA
tttgtagaatctgcaagtggatatttggatggctttgtggatttcgttggaaacgggagtatcttcatagaaaacctagacagtaacattctcagaaacggctttgtgatatccgcattc

SEQ ID NO: 121846 - DNA, 120 bp, synthetic construct
  source 1..120: mol_type = other DNA
ctctttttgtcgtatctggaagtggacatttggagcactttgacgcctttggtgaaaaaggaaatgtcttcccatgaaaactagacagaagcattctaagaaacttttttgggatatatg

SEQ ID NO: 121847 - DNA, 120 bp, synthetic construct
  source 1..120: mol_type = other DNA
tatcttcccatgcaaactagacagaagcattcgcagaaacttgtttgtgatgtgtgtccttaactcacggagttgaacatttcgtttgacagagcagtttggaaacacgatttttgtaga

SEQ ID NO: 121848 - DNA, 120 bp, synthetic construct
  source 1..120: mol_type = other DNA
gtgatatctgcattgatatcagagagttgaatattccctttctaagggaaggcttgaaagcgtcttttcgtggaatctgctggaggatatttggatagctttgagggttactttggaaac

SEQ ID NO: 121849 - DNA, 120 bp, synthetic construct
  source 1..120: mol_type = other DNA
gagcactttgacgcctttggtgaaaaaggaaatgtcttcccgtcaaaactagacagaagcattctaagaaacatttttgggatatatgtactcaagtaacagagttgaacctttctcttt

SEQ ID NO: 121850 - DNA, 120 bp, synthetic construct
  source 1..120: mol_type = other DNA
acatttcgtttgacagagcagttcggaaacacgatttttgtagaatcttcaagtggatatttggatggctttgtggatttcgttggaaacgggagtatcttcatagacaacctagacagt

SEQ ID NO: 121851 - DNA, 120 bp, synthetic construct
  source 1..120: mol_type = other DNA
ctgaggatttcgttggagacgggaatacataaagaaagtagacagcagcattctcaggagattctttgtgatgtttgcttttaagtcacagagttgaatattcccttcaatagagcaggt

SEQ ID NO: 121852 - DNA, 120 bp, synthetic construct
  source 1..120: mol_type = other DNA
tgtcctcaactcacagagttgaacatttcttttgacagagcagtttggaaacacgatttttgtagaatctgcaagtggatatttggatggctttgtggatttcgttggaaacgggagtat

SEQ ID NO: 121853 - DNA, 120 bp, synthetic construct
  source 1..120: mol_type = other DNA
atttttgggatatatgtactcaactaacagagttgaacctttctctttatagatcagtttcggaaagctctttatgtggaatctgcagatggatattcggatagctctgaggatttcgtt

SEQ ID NO: 121854 - DNA, 120 bp, synthetic construct
  source 1..120: mol_type = other DNA
ttgaaacaccctttctgtagtatctggatgtgggcacttggagctcttggacgcttatggtgaaaaaggaaatatcgtcccataaaacctagacagaagcattctcacaaactgctttgt

SEQ ID NO: 121855 - DNA, 120 bp, synthetic construct
  source 1..120: mol_type = other DNA
tctggaagtggacatttcgatcgatttcaggcctatgttgaaaaaggaaatatcgtaacataaaaaatagacagaagcattctcagaaacgtctttgtgatgtgtgtcctcaactaacag

SEQ ID NO: 121856 - DNA, 120 bp, synthetic construct
  source 1..120: mol_type = other DNA
tgaaaaaggacagatcttcccataaaaactagacagaagcattctcacaaactgctttgtgacgtatgtcttcaactaacagagttgaacatttctattcacagagcagttttgaaagac

SEQ ID NO: 121857 - DNA, 120 bp, synthetic construct
  source 1..120: mol_type = other DNA
gtttgaaaccgtctttctgtagaatctgcggtagtatatttggatagctttgaggatttcgttggaaacgggattacacatacaaagtcgacagcagcattctcagaagcttctttgtga

SEQ ID NO: 121858 - DNA, 120 bp, synthetic construct
  source 1..120: mol_type = other DNA
tgtgacagagcagtttggaaacacgctttttgtagaatctgcaagtggatatttggatagctttgtggatttccttgggaacgggagtatcttcatataaaacctagacggaaacattct

SEQ ID NO: 121859 - DNA, 120 bp, synthetic construct
  source 1..120: mol_type = other DNA
cttttaaatcgcagagttcaatattcccttccatagagcaggtttgagacactctttctgtagtatctggaagtggacatttcgagcgatttcaggcctaggttgaaaaaggaaatatct

SEQ ID NO: 121860 - DNA, 120 bp, synthetic construct
  source 1..120: mol_type = other DNA
agctgtaacgatttcgttggatacgggaataacttcatataaattctagacagaggcactctcagaaactgctttttgatatctgcattcaagtcacggagttgaacattctctttctta

SEQ ID NO: 121861 - DNA, 120 bp, synthetic construct
  source 1..120: mol_type = other DNA
ggagactctgcaagtggatatttggagagctttaaggatttcactggaaaccggaatatcttgaggaaaaatctagacagaggcattctcagaaacttctttgtgatgtgtgtcctcaac

SEQ ID NO: 121862 - DNA, 120 bp, synthetic construct
  source 1..120: mol_type = other DNA
tttggtgaaaaaggaaatatcttccataaaaactagacagaagcattctaagaaacttcttggcgatatatgtactcacctaacagagttgaacctttctattgatagatcagtttcgaa

SEQ ID NO: 121863 - DNA, 120 bp, synthetic construct
  source 1..120: mol_type = other DNA
aagtggatatttggatagctctaactatttcgttggaaacgggaatatcttcatataaaatctagacacaagcactctcagaaactactttctgatatctgcattcaagtcacagagttg

SEQ ID NO: 121864 - DNA, 120 bp, synthetic construct
  source 1..120: mol_type = other DNA
tctctaagtgggcttcatccctgggatgcaaggctggttcaatatacgcaaatcaataaatgtaatccagcatataaacagagccaaagacaaaaaccacatgattatctcaatagatgc

SEQ ID NO: 121865 - DNA, 120 bp, synthetic construct
  source 1..120: mol_type = other DNA
atttaataaatggtgctgggaaaactggctagccatatgtagaaagctgaaactggatcccttccttacaccttatacaaaaatcaattcaagatggattaaagatttaaacgttaaacc

SEQ ID NO: 121866 - DNA, 120 bp, synthetic construct
  source 1..120: mol_type = other DNA
agcccacttgatcatggtggataagctttttgatgtgctgctggattccatttgccagtattttattgaggatttttgcatcaatgttcatcaaggatattggtctaaaattctcttttt

SEQ ID NO: 121867 - DNA, 120 bp, synthetic construct
  source 1..120: mol_type = other DNA
gtctttgttctcgttggtttcaaagaacatctttatttctgccttcattttgttatgtacccagtagtcattcaggagcaggttgttcagtttccatgtagttgagcggctttgagtgag

SEQ ID NO: 121868 - DNA, 120 bp, synthetic construct
  source 1..120: mol_type = other DNA
gtgcgtttacaaacctttagctagacagaaaagttctccaggtcccccacccaacccaaaagcccagccagcttcacctctcaatggcactctccacaggagtttgcagcacctagccca

SEQ ID NO: 121869 - DNA, 120 bp, synthetic construct
  source 1..120: mol_type = other DNA
caggggcacactgacacctcacacggcagggtattccaacagacctgcagctgagggtcctgtctgttagaaggaaaactaacaaccagaaaggacatctacaccaaaaacccatctgta

SEQ ID NO: 121870 - DNA, 120 bp, synthetic construct
  source 1..120: mol_type = other DNA
aataaaatactttatagacaagcaaatgctgagagattttgtcaccaccaggcctgccctaaaagagctcctgaaggaagccctaaacatggaaaggaacaaccggtaccagccgctgca

SEQ ID NO: 121871 - DNA, 120 bp, synthetic construct; identical to SEQ ID NO: 35799
  source 1..120: mol_type = other DNA

SEQ ID NO: 121872 - DNA, 120 bp, synthetic construct; identical to SEQ ID NO: 35800
  source 1..120: mol_type = other DNA

SEQ ID NO: 121873 - DNA, 120 bp, synthetic construct; identical to SEQ ID NO: 35801
  source 1..120: mol_type = other DNA

SEQ ID NO: 121874 - DNA, 120 bp, synthetic construct; identical to SEQ ID NO: 35802
  source 1..120: mol_type = other DNA

SEQ ID NO: 121875 - DNA, 120 bp, synthetic construct; identical to SEQ ID NO: 35803
  source 1..120: mol_type = other DNA

SEQ ID NO: 121876 - DNA, 120 bp, synthetic construct; identical to SEQ ID NO: 35804
  source 1..120: mol_type = other DNA

SEQ ID NO: 121877 - DNA, 120 bp, synthetic construct; identical to SEQ ID NO: 35805
  source 1..120: mol_type = other DNA

SEQ ID NO: 121878 - DNA, 120 bp, synthetic construct; identical to SEQ ID NO: 35806
  source 1..120: mol_type = other DNA

SEQ ID NO: 121879 - DNA, 120 bp, synthetic construct
  source 1..120: mol_type = other DNA
taagctgtaagtttgcctttcttcatggtccaggaccatagccctcctgcacaaatagctcacaatcttcctgtgcccagctaccatcaggccctcagctgatggaaaaatgcaggttat

SEQ ID NO: 121880 - DNA, 120 bp, synthetic construct
  source 1..120: mol_type = other DNA
cagtggagtcaggtagcttagatttgcctgaactgcaaaccggctgattgacatagactttctcgtagcaaggcacaactgctaaatgaaaaataccattgttcttagcttaaaataaaa

SEQ ID NO: 121881 - DNA, 120 bp, synthetic construct
  source 1..120: mol_type = other DNA
ttagactttgggaatttggaccttgtctatatttagcatccagaaaccactatggggctgtcattggttaggtgtttccagtcccagttcttgctgcagttagatagtttgttctgaagt

SEQ ID NO: 121882 - DNA, 120 bp, synthetic construct
  source 1..120: mol_type = other DNA
tcctcttctgtctccagatctgagtgaaggagagagaggtgcttttagaaagaattgacttgtagtttggaaactccttcctggttagagaaaatgggcctctgtatcaagactttttct

SEQ ID NO: 121883 - DNA, 120 bp, synthetic construct
  source 1..120: mol_type = other DNA
ttgattcttatatgcatccattccgatcaagatacggaatagccggctccatttcagtttgaatttccaaaattaccgcgtggcataatctgtacactgaatttcagtgacgcataggcg

SEQ ID NO: 121884 - DNA, 120 bp, synthetic construct
  source 1..120: mol_type = other DNA
ctgcctcagactcccaaagtgcagagattacaggcgtgagccacagtgcccggccaaaacaaatttttaaaaattaaaatcatatcaagttcttctcagaccacagtggaataaaaactt

SEQ ID NO: 121885 - DNA, 120 bp, synthetic construct
  source 1..120: mol_type = other DNA
tgtgatacagaacaaaggcattgagagaatcatctcaccaatgatcgttcagctttgccatctgctcatctcaatggagaggaaagaagtggagaatgaagtatttgcctcgttggagaa

SEQ ID NO: 121886 - DNA, 120 bp, synthetic construct
  source 1..120: mol_type = other DNA
tgaagagacagattgaccactggaacagaataaaaagcccagaaacacacaactacacatggatctgtacaccacaaagagtggactttagtgcacgcaaatttgaaaaatgaaccaggc

SEQ ID NO: 121887 - DNA, 120 bp, synthetic construct
  source 1..120: mol_type = other DNA
ctgagaaattctaggtctggagccaggaatacacaaaataaggctggaacatcttgtagcaccagaaggaaaagaaaggatggaggcgtgtaagaaggacatgtggtgggctgaataatg

SEQ ID NO: 121888 - DNA, 120 bp, synthetic construct
  source 1..120: mol_type = other DNA
aacaatcaggtctttgggggtggaggtgggaggatgtattgctctgcattcaagcagtaaaaacatgtgacactcaaattaggaggatatgaggagagtttaatcaaaggactacttaca

SEQ ID NO: 121889 - DNA, 120 bp, synthetic construct; identical to SEQ ID NO: 35807
  source 1..120: mol_type = other DNA

SEQ ID NO: 121890 - DNA, 120 bp, synthetic construct
  source 1..120: mol_type = other DNA
tgggcagatcacgaggtcaggagttcaagaccagcctggccaacatggtggaaacctgtctctactaaaatacaaagcaaaaccaaaatgaaaaccacacaaatttcatgtttttgtttg

SEQ ID NO: 121891 - DNA, 120 bp, synthetic construct
  source 1..120: mol_type = other DNA
ggcagaggttgcagtgaactgcaattgcaccagtgcactccagcctgggtgacagagcgagactccatctcaacaacaacaacaacgacaacaacaaatatatatacacatatatatata

SEQ ID NO: 121892 - DNA, 120 bp, synthetic construct; identical to SEQ ID NO: 35808
  source 1..120: mol_type = other DNA

SEQ ID NO: 121893 - DNA, 120 bp, synthetic construct; identical to SEQ ID NO: 35809
  source 1..120: mol_type = other DNA

SEQ ID NO: 121894 - DNA, 120 bp, synthetic construct
  source 1..120: mol_type = other DNA
tgaatatataatagaaacaagtaaatgaataaaatgacctggttactatagataagccaaattttgaaccatctagaacaatggtgtagtcttccctctactcaatgtaaatgctgggtt

SEQ ID NO: 121895 - DNA, 120 bp, synthetic construct
  source 1..120: mol_type = other DNA
atgtttttgttctgtttctgtcttttgctttcttccccccctgcaacttttgggcatgtatttgtagtcatcagagattgaaatacaagtatttgtcctatgtagaactggtccttttgc

SEQ ID NO: 121896 - DNA, 120 bp, synthetic construct; identical to SEQ ID NO: 35810
  source 1..120: mol_type = other DNA

SEQ ID NO: 121897 - DNA, 120 bp, synthetic construct; identical to SEQ ID NO: 35811
  source 1..120: mol_type = other DNA

SEQ ID NO: 121898 - DNA, 120 bp, synthetic construct
  source 1..120: mol_type = other DNA
gaactttgaccacctttttttattttcagctatttggtgatgtttgcttccactgcaatcgtgttatagaaggtgatggtaagtatctgtgtgagttttagattggtgccactttgacac

SEQ ID NO: 121899 - DNA, 120 bp, synthetic construct
  source 1..120: mol_type = other DNA
aagtccacagtttgctttatcatttcccacgctcagtcttcctgtgtaaaacacatacttacataaatattatatacaagtacgatggctgtttctaaagcatttgccaataagttcatc

SEQ ID NO: 121900 - DNA, 120 bp, synthetic construct; identical to SEQ ID NO: 35812
  source 1..120: mol_type = other DNA

SEQ ID NO: 121901 - DNA, 120 bp, synthetic construct; identical to SEQ ID NO: 21122
  source 1..120: mol_type = other DNA

SEQ ID NO: 121902 - DNA, 120 bp, synthetic construct
  source 1..120: mol_type = other DNA
attttttgtcttcaataagttatgataaattgttaggctatgaatttttctcagtttgccacctagtataaaaatttagtgcataaagattcttggccgggcgcagtggctcatgcctgt

SEQ ID NO: 121903 - DNA, 120 bp, synthetic construct
  source 1..120: mol_type = other DNA
cctaaaattttaaatttaagttttgactctgtttagacacctgtgtcgcccctgtcataatcgtgagaaagccagaggccttgggaaatacatctgccagaaatgccatgctatcatcga

SEQ ID NO: 121904 - DNA, 120 bp, synthetic construct; identical to SEQ ID NO: 21188
  source 1..120: mol_type = other DNA

SEQ ID NO: 121905 - DNA, 120 bp, synthetic construct; identical to SEQ ID NO: 35813
  source 1..120: mol_type = other DNA

SEQ ID NO: 121906 - DNA, 120 bp, synthetic construct; identical to SEQ ID NO: 21187
  source 1..120: mol_type = other DNA

SEQ ID NO: 121907 - DNA, 120 bp, synthetic construct; identical to SEQ ID NO: 35814
  source 1..120: mol_type = other DNA

SEQ ID NO: 121908 - DNA, 120 bp, synthetic construct
  source 1..120: mol_type = other DNA
tttgtattatttttatttttctattggttttttttattgtttggggttttttcttccacatttttttttatccttggttgatcaaattcaaggatgcagacccagcagatacagaaggct

SEQ ID NO: 121909 - DNA, 120 bp, synthetic construct
  source 1..120: mol_type = other DNA
tgggaaactacactgtgttcagctatccagaagctgtctgcaccctgtccttttaaatttttacggaggcttcattatgtaggcatgatgaattaaacacttggccactggtgatcaact

SEQ ID NO: 121910 - DNA, 120 bp, synthetic construct
  source 1..120: mol_type = other DNA
aattgtgaatgaggtggatagaaaacacaaaccattttccctctgcttgcacaccacaacaatcaacacaagttcttctgtgaccaaacgtgtgggaacttcaccacacgccaagcaagc

SEQ ID NO: 121911 - DNA, 120 bp, synthetic construct; identical to SEQ ID NO: 2186
  source 1..120: mol_type = other DNA

SEQ ID NO: 121912 - DNA, 120 bp, synthetic construct
  source 1..120: mol_type = other DNA
cagctgattaaccctgacttagtacatgctcagggctgggttctttgttggtgcttcacatttctctctccttagtttggatttcacaaatgtgtcccttttttcccatcacaaaatgca

SEQ ID NO: 121913 - DNA, 120 bp, synthetic construct
  source 1..120: mol_type = other DNA
catctggagaataagacatttctttttggttaaatgatattagagaaaaaaaaaactatccaaggctgctaacaaataatcttcactttcaattatatccagcaataagttgttctccag

SEQ ID NO: 121914 - DNA, 120 bp, synthetic construct; identical to SEQ ID NO: 35815
  source 1..120: mol_type = other DNA

SEQ ID NO: 121915 - DNA, 120 bp, synthetic construct; identical to SEQ ID NO: 66788
  source 1..120: mol_type = other DNA

SEQ ID NO: 121916 - DNA, 120 bp, synthetic construct
  source 1..120: mol_type = other DNA
ataaaatagggtttttgtgatcagatagaatttgctgctcggttcttagtgttgtttgatcttcgatctaagaagtggctgacggtctgcaacctgctgttctttgcgtgttacagcaac

SEQ ID NO: 121917 - DNA, 120 bp, synthetic construct
  source 1..120: mol_type = other DNA
tgggattacaggcgtgagccactgcagccatctgccatgttgctttccttcttccaaactgcacagtggttagagcctgagattatttattgaatgccttctgtgttttaaggtgtagtg

SEQ ID NO: 121918 - DNA, 120 bp, synthetic construct; identical to SEQ ID NO: 35816
  source 1..120: mol_type = other DNA

SEQ ID NO: 121919 - DNA, 120 bp, synthetic construct
  source 1..120: mol_type = other DNA
ggaagcctgactggttcagggggcagcaaggtgattgttctgtttcctttttccccctgcttgtgatgaaaaggaatacttcttgcaaaatatatattatattacctctaaaactagcgg

SEQ ID NO: 121920 - DNA, 120 bp, synthetic construct
  source 1..120: mol_type = other DNA
agtaggttcctgatcacttggtaactaactgcattttcatcatgtcgtccgcaagggaggcttagtgttgtcattgtcagtaattacgttagaaaaattctgcagtctaaaacggcccaa

SEQ ID NO: 121921 - DNA, 120 bp, synthetic construct; identical to SEQ ID NO: 35817
  source 1..120: mol_type = other DNA

SEQ ID NO: 121922 - DNA, 120 bp, synthetic construct; identical to SEQ ID NO: 35818
  source 1..120: mol_type = other DNA

SEQ ID NO: 121923 - DNA, 120 bp, synthetic construct
  source 1..120: mol_type = other DNA
tgcctctgtcctcatccatctgtctgtctgtctctttctttccctccctccctgcctcctcactgtttcacatggtcattgtaaaaaagaaacctaaaaaattaggaaatgtagataaat

SEQ ID NO: 121924 - DNA, 120 bp, synthetic construct
  source 1..120: mol_type = other DNA
cacctccatatgttcagcaacccagaagttcccctaaactgtcctattgagtttttatggaggcttcttttcataggcatgattgatttgatcattgaccacaactcctctcccttccaa

SEQ ID NO: 121925 - DNA, 120 bp, synthetic construct; identical to SEQ ID NO: 35819
  source 1..120: mol_type = other DNA

SEQ ID NO: 121926 - DNA, 120 bp, synthetic construct; identical to SEQ ID NO: 35820
  source 1..120: mol_type = other DNA

SEQ ID NO: 121927 - DNA, 120 bp, synthetic construct
  source 1..120: mol_type = other DNA
taactggggcgagatgagatctcattgtacttttgatttgcatttctctgatgatcagtggtattgagtaccttttcataggcctgtttgccatttgtacgttttcttttgagaaatatc

SEQ ID NO: 121928 - DNA, 120 bp, synthetic construct
  source 1..120: mol_type = other DNA
cctggtctttcaaaaagctgtggttgtgtgggtctttaaggtattccttcagtaattgtggtggccactatttcatttaaggagttagcatcttataaagaaaaatctgttttctcaagg

SEQ ID NO: 121929 - DNA, 120 bp, synthetic construct
  source 1..120: mol_type = other DNA
agaggttgcagtgagctgagactgcatcattgcactccagcctgggcaacatgcaagaatctgtcgcaaaaaaaaaaaaaaaaaaaaaaaaaaaaaaaaagcatttttgcttgtattata

SEQ ID NO: 121930 - DNA, 120 bp, synthetic construct
  source 1..120: mol_type = other DNA
agttcctattgcctcaacatgtccccctcctttttagtttagtttagtttttttttttttgagatggagttttgctcttgttgtccaggctgtgcaatggcgtgatctcggttcacagca

SEQ ID NO: 121931 - DNA, 120 bp, synthetic construct
  source 1..120: mol_type = other DNA
ctccacagataacctcaggttctcctgaagcctctagatcttatttgacattttattataggtgcaacttcttgtggcctgttcttccatcttcaaagcacattactctgacctctgttt

SEQ ID NO: 121932 - DNA, 120 bp, synthetic construct
  source 1..120: mol_type = other DNA
ccagagtagctgggactacaggcgcccgccaccacgcccagctaatttttgtatttttagtagagatggggtttcaccatgctggccaggctggtcttgaactcccgacctcaggcgatc

SEQ ID NO: 121933 - DNA, 120 bp, synthetic construct
  source 1..120: mol_type = other DNA
tgtaacttctgttcacagactaagagagatggagtctttcctcttggatgacatcagctctgtgatacagaacaaaggcattgagagaatcatctcaccaatgatcgttcagctttgcca

SEQ ID NO: 121934 - DNA, 120 bp, synthetic construct
  source 1..120: mol_type = other DNA
agcgggattgcttgaacctggaaggcagcagttgtggtgagccaagaccgtgccattgcactccatcctgggcaacaagagcaaaaatccatctcaaaaaaattaaaaaaaatttttttt

SEQ ID NO: 121935 - DNA, 120 bp, synthetic construct
  source 1..120: mol_type = other DNA
ctagattaaatcagtaataaaagatctcccaagaaagaaaagcccaggaccagatggattcatagttgaattttatcaaatgtacaaagaagaactaatacaagtcctcctgaaactgtt

SEQ ID NO: 121936 - DNA, 120 bp, synthetic construct; identical to SEQ ID NO: 66772
  source 1..120: mol_type = other DNA

SEQ ID NO: 121937 - DNA, 120 bp, synthetic construct; identical to SEQ ID NO: 66771
  source 1..120: mol_type = other DNA

SEQ ID NO: 121938 - DNA, 120 bp, synthetic construct
  source 1..120: mol_type = other DNA
ccagtgaactatacttcaggaatgaaggggaaataaaaacatttcttgtcaaaatataaacaaaagttacccagaagaaacacaaagcctgaatgaattattagctatagagagactgaa

SEQ ID NO: 121939 - DNA, 120 bp, synthetic construct
  source 1..120: mol_type = other DNA
ctggaaagggatcgggatcccgatccacaccctaagagaggattcttgaatcttgcacaagaaagaattcaggatgaatctgcagtgcaaagcaaaagcaagtttattaaagaaagtaaa

SEQ ID NO: 121940 - DNA, 120 bp, synthetic construct
  source 1..120: mol_type = other DNA
aatactaaaaagcttgtttctgatcttttttcaaagtttccaagtaaaatgattaaatatgattcgtcatcaagagaaagctttatactaaacagtaaaacacagagccaattttatcca

SEQ ID NO: 121941 - DNA, 120 bp, synthetic construct
  source 1..120: mol_type = other DNA
caaaaacaatcttaaacgaataagtaaatttggttaaatagttgcacatgttttctctatgaacagaaatcagaaatggaaatggaaaaccatgtcattgaatagcaactaaattcaaag

SEQ ID NO: 121942 - DNA, 120 bp, synthetic construct
  source 1..120: mol_type = other DNA
gacccagaacagaaatgagtaccaatggccagatgtctcccaaggcaatacaagaagtgagttcaaagtggaatggttttttttttattttttgagaaggagtcttgttctgtcgcccag

SEQ ID NO: 121943 - DNA, 120 bp, synthetic construct
  source 1..120: mol_type = other DNA
cgagaccatcctggctaatgtggtgaaaccctgtctcaactaaaaatacaaaaaattagccaggtttggtggtgggtacctgtagtcccagctactcgggatactgaggcaggagaatgg

SEQ ID NO: 121944 - DNA, 120 bp, synthetic construct
  source 1..120: mol_type = other DNA
tgtgttgctctcatatcccataatatggctgaactcactctttagtgagttgtcaccacttcttattttaaccattttaataaaagtgtagtgacagctcgctgtggtttcagtttgcta

SEQ ID NO: 121945 - DNA, 120 bp, synthetic construct
  source 1..120: mol_type = other DNA
actccatctcaaaaaaaaaaaaaaaatttacatggaggccaggtgcagtgactcacgcctataatcccagcactttgggaggccaaggcaggtggatcaccggaggtcaggagttcgaga

SEQ ID NO: 121946 - DNA, 120 bp, synthetic construct
  source 1..120: mol_type = other DNA
tgtatgaggtgtgaagcttatgttgatgttcatttttctgcctgttgatatccaccttatctagtacaatttgttgaaaagtttatccttcctctattgaatggcttttgcacctttttc

SEQ ID NO: 121947 - DNA, 120 bp, synthetic construct
  source 1..120: mol_type = other DNA
tttctggagtcttgccttaatatatatatatatattttttttttttttgctaatacacagactgtccttcacggctgcgcctatgcgtcactgaaattcagtgtacagattatgccacgc

SEQ ID NO: 121948 - DNA, 120 bp, synthetic construct
  source 1..120: mol_type = other DNA
gtgaatcagagttaattatagaggccctgtgatcctaatccacagtctccctattcttttgtctgtgaatatagaacatgggtgggtcagaggccaaatggttcctaagccagatgatga

SEQ ID NO: 121949 - DNA, 120 bp, synthetic construct
  source 1..120: mol_type = other DNA
tttcctccgactgcagagaagcacacaagctgtggcacctggtgctcagactcacactgcaacacttccaccagtagatggcagagaggtactttcctgcctgttcagccacgaaaatcc

SEQ ID NO: 121950 - DNA, 120 bp, synthetic construct
  source 1..120: mol_type = other DNA
cctgtacctgttttagctagtccttaatatggtccagtatccgcgccctgcctttggagtcaagttcaacttcctacctcaattgatgatagcagtttctgaaaactaacacatgtagat

SEQ ID NO: 121951 - DNA, 120 bp, synthetic construct
  source 1..120: mol_type = other DNA
cttcgagaggccaaggtgagaggactgtttgagcccaggagtttgagagcagccttggtaacatagcaagaccctgtctctataaaaatcaaataaaaaataaatagaggaaaagcacat

SEQ ID NO: 121952 - DNA, 120 bp, synthetic construct
  source 1..120: mol_type = other DNA
gcctgggtgacagagcaagactctgtctcaaaaaaaaaaaaaaaaaaaaagaaagaaaatacaggccacacagatggggagatgataattgcaagttatatatttgataaaggactttca

SEQ ID NO: 121953 - DNA, 120 bp, synthetic construct
  source 1..120: mol_type = other DNA
tacccttacaatggtatgtacatttcatccaagtaacgctgctttaaaatttgaaattaagcacctaatgatattaagaaatgaataacaaaataaacccaaagaaagcaggggggaaaa

SEQ ID NO: 121954 - DNA, 120 bp, synthetic construct
  source 1..120: mol_type = other DNA
tcttctgtcctttcaatagtttgctcagaatgatggtttccagctgcatccatatccctacaaaggacatgaactcatccttttttatggctgcttagtattccacggtgtatatgtgcc

SEQ ID NO: 121955 - DNA, 120 bp, synthetic construct
  source 1..120: mol_type = other DNA
tgtttttgtcaggtttgtcaaagatcaggtggttgtagatgtgtggtattacttccaagggctctgttctgttccattggttctgttctgtctctgttttcgtaccagtaccatgctgtt

SEQ ID NO: 121956 - DNA, 120 bp, synthetic construct
  source 1..120: mol_type = other DNA
cacatttctaagtgacccacaggtaaagaaggaaattacaagaaaaacagaaaacattttgctttttttttttgagacggagccttggtctgtcgcccaagctggagtgcagtggtgcaa

SEQ ID NO: 121957 - DNA, 120 bp, synthetic construct
  source 1..120: mol_type = other DNA
tcagaaatgaaatggaagacattagcacagattcgacacaacagaaaggtaataaaggaatattgtggaccaggtgtggtggctcatgcctgtaatcctaacactttgggaggctgaggt

SEQ ID NO: 121958 - DNA, 120 bp, synthetic construct
  source 1..120: mol_type = other DNA
acaaaaaattagccgggcgtggtggcgggcgcctgtagtcccagctactcgggcggctgaggcagaagaatgtcatgaacccggcaggcggagcttgcagtgagccaagatcgtgccact

SEQ ID NO: 121959 - DNA, 120 bp, synthetic construct; identical to SEQ ID NO: 35821
  source 1..120: mol_type = other DNA

SEQ ID NO: 121960 - DNA, 120 bp, synthetic construct
  source 1..120: mol_type = other DNA
tggcggtgatatcatcagcctgggcctccgtttcttttttcttttttttctttttcctgagacggagtcttgctctgtctcccaggctggagtgcagtggcacaatcttggctcgctgca

SEQ ID NO: 121961 - DNA, 120 bp, synthetic construct
  source 1..120: mol_type = other DNA
tatgggttcccccactcataaagaatgccgaggagttaggaataggacaagcacgtgtccctcaaggctactgttgggatgcccaggacttgtctgagcccttctctagaccggctgctc

SEQ ID NO: 121962 - DNA, 120 bp, synthetic construct
  source 1..120: mol_type = other DNA
gtgggacactcaaacatccatccacagatgaatggagacacagaatgttccacaaaatggaatattactcagccttaaaaaggaaggaagttctgagacatgctacaacacaaaggaacc

SEQ ID NO: 121963 - DNA, 120 bp, synthetic construct
  source 1..120: mol_type = other DNA
gccacccccggtgggggcaagctccgtggctgcgccacgccctggagggctttagaaagcagctgtgtttgctttgcccctagatgtcacttagaaacagtgtgtcccataattgttttc

SEQ ID NO: 121964 - DNA, 120 bp, synthetic construct
  source 1..120: mol_type = other DNA
ctggtaccttggggaggcactgggaagtttcagccagggaaggaatgactgctctgatttctatttctaaaagatccaacaagccactggagagagaatgactgagggtggaaaaacagt

SEQ ID NO: 121965 - DNA, 120 bp, synthetic construct
  source 1..120: mol_type = other DNA
gagtgacaccagggccagctttgccagataagcgcaatagtgggcaagcagtgagaacatgaagggtgttcctaacagagtggctctaacacggtgctgccatggaagttttctagggag

SEQ ID NO: 121966 - DNA, 120 bp, synthetic construct
  source 1..120: mol_type = other DNA
ggcctatcatcctaaacgtgaaaacagatgcaggtgtcaagccgatgcttagggagatactcagccctcccaaatcccaagaaaggattaggccttccaaaaaattctagtgacaacttt

SEQ ID NO: 121967 - DNA, 120 bp, synthetic construct
  source 1..120: mol_type = other DNA
ggaaagaaaagaaaaattcagcctgtaatcttagtactctgggaggccctggctaggagcttgagaccagcctaggcaacatagtgagacccccatctctacaaaaaaatattaaaatta

SEQ ID NO: 121968 - DNA, 120 bp, synthetic construct
  source 1..120: mol_type = other DNA
ataataatcgttgctaagttgaatacctgtattcaactgaatttgaatgtgtatagggaggcgcatgtgagaccattcagataacaggccatacgtggtgcctgcacacactagctctta

SEQ ID NO: 121969 - DNA, 120 bp, synthetic construct
  source 1..120: mol_type = other DNA
tgtcatatggagaaagaccctagagctccaagctctcagggtgccagaccaaagattctgcaagacccttgtcggcctgtcacccaatgggtgctctctagaggacagaggggtaaatgg

SEQ ID NO: 121970 - DNA, 120 bp, synthetic construct
  source 1..120: mol_type = other DNA
tggcagatctgggagccacaagaaatgctctgctatttcatactatgcattcttcagaggctggtgcaatagagtttaatcaacttcctctggaagagactatattcatgcagacttgta

SEQ ID NO: 121971 - DNA, 120 bp, synthetic construct
  source 1..120: mol_type = other DNA
ggaactgggtttactgattccccttgtgattctagctcctttaaccttaagacggagcctttcttctggcaattacccaggaatgggactttcttccagcacagcagagaaaacaggatt

SEQ ID NO: 121972 - DNA, 120 bp, synthetic construct
  source 1..120: mol_type = other DNA
tgaaacaacttgaactctgtccacacctgattcaggcaataagtgtctgtgggtcagggcaggggttatgggtggatcccaccgtggtgtgactgtggggagagtccagggcagctcagc

SEQ ID NO: 121973 - DNA, 120 bp, synthetic construct
  source 1..120: mol_type = other DNA
tacaagctgtactccatccaccttggatacatgatctcagaacctcctggggttgtgtcatgggccactggtcactcatatttggctcagaataaatctattcaaatattttagagagtt

SEQ ID NO: 121974 - DNA, 120 bp, synthetic construct
  source 1..120: mol_type = other DNA
ccttaaccttggcaaaattaaccttctaaattgattgaggcaagtctcagatacttttgggttcacaacctgatgagagaacagaaaggccccagtctgctgattgccaccctcaacata

SEQ ID NO: 121975 - DNA, 120 bp, synthetic construct
  source 1..120: mol_type = other DNA
tgccctggtttgtctcagctctgtggaatctaaaataaaagactgaaagagaggactactcaatgattctaagcaaggtaagataggttgtagtgatacctgagcatgcagctcatggag

SEQ ID NO: 121976 - DNA, 120 bp, synthetic construct
  source 1..120: mol_type = other DNA
gacagacactggcctgaaggcaaaggaccctagatgaggttacgggcccagggaaagggaggtgacaccaagaggcacagactgtaaccgcaactctgtcactagagtccagtatcctca

SEQ ID NO: 121977 - DNA, 120 bp, synthetic construct
  source 1..120: mol_type = other DNA
gattttatatgaagatatttctttcttctaatataggctacaaagcgttccaaatgtccacttgcagattttgcaaaaagagtgtttccaaactgctcaatcaaaagaaaagttcaactc

SEQ ID NO: 121978 - DNA, 120 bp, synthetic construct
  source 1..120: mol_type = other DNA
tccaaaccgggtcaatcaaaagaaaggttgaactctgtgagatgaacacatgcatcaaaaagaagtttctcataatgcttctgtctagtttttatgtgaagatatttccttttctaccat

SEQ ID NO: 121979 - DNA, 120 bp, synthetic construct
  source 1..120: mol_type = other DNA
atgaaagtatcaactctgtgagatgaacccacacatcacaactgctttctcagaattcttctgtctagttttttttgtgaagatagttccttttccaccattggcctcaaagctctccaa

SEQ ID NO: 121980 - DNA, 120 bp, synthetic construct
  source 1..120: mol_type = other DNA
cttttctaccacagcccgcaaatcactccaaatgtccacttgtagattctacaaacagagtgtttccaaactgcagaatcaaaagaaagtttcatctctgtgagatgaacgcacacatca

SEQ ID NO: 121981 - DNA, 120 bp, synthetic construct; identical to SEQ ID NO: 35822
  source 1..120: mol_type = other DNA

SEQ ID NO: 121982 - DNA, 120 bp, synthetic construct; identical to SEQ ID NO: 35823
  source 1..120: mol_type = other DNA

SEQ ID NO: 121983 - DNA, 120 bp, synthetic construct; identical to SEQ ID NO: 35824
  source 1..120: mol_type = other DNA

SEQ ID NO: 121984 - DNA, 120 bp, synthetic construct; identical to SEQ ID NO: 35825
  source 1..120: mol_type = other DNA

SEQ ID NO: 121985 - DNA, 120 bp, synthetic construct; identical to SEQ ID NO: 35826
  source 1..120: mol_type = other DNA

SEQ ID NO: 121986 - DNA, 120 bp, synthetic construct; identical to SEQ ID NO: 35827
  source 1..120: mol_type = other DNA

SEQ ID NO: 121987 - DNA, 120 bp, synthetic construct; identical to SEQ ID NO: 35828
  source 1..120: mol_type = other DNA

SEQ ID NO: 121988 - DNA, 120 bp, synthetic construct; identical to SEQ ID NO: 35829
  source 1..120: mol_type = other DNA

SEQ ID NO: 121989 - DNA, 120 bp, synthetic construct; identical to SEQ ID NO: 35830
  source 1..120: mol_type = other DNA

SEQ ID NO: 121990 - DNA, 120 bp, synthetic construct; identical to SEQ ID NO: 35831
  source 1..120: mol_type = other DNA

SEQ ID NO: 121991 - DNA, 120 bp, synthetic construct; identical to SEQ ID NO: 35832
  source 1..120: mol_type = other DNA

SEQ ID NO: 121992 - DNA, 120 bp, synthetic construct; identical to SEQ ID NO: 35833
  source 1..120: mol_type = other DNA

SEQ ID NO: 121993 - DNA, 120 bp, synthetic construct; identical to SEQ ID NO: 35834
  source 1..120: mol_type = other DNA

SEQ ID NO: 121994 - DNA, 120 bp, synthetic construct; identical to SEQ ID NO: 35835
  source 1..120: mol_type = other DNA

SEQ ID NO: 121995 - DNA, 120 bp, synthetic construct; identical to SEQ ID NO: 35836
  source 1..120: mol_type = other DNA

SEQ ID NO: 121996 - DNA, 120 bp, synthetic construct; identical to SEQ ID NO: 35837
  source 1..120: mol_type = other DNA

SEQ ID NO: 121997 - DNA, 120 bp, synthetic construct
  source 1..120: mol_type = other DNA
ggctggtctcaaactcctgacctcaagtgatccaccgaacccagcctcagatgatattcttaacagaaatattaaagaaaggtgtaagagaacatgtggtgacttgagttgacaaaagaa

SEQ ID NO: 121998 - DNA, 120 bp, synthetic construct; identical to SEQ ID NO: 35838
  source 1..120: mol_type = other DNA

SEQ ID NO: 121999 - DNA, 120 bp, synthetic construct; identical to SEQ ID NO: 35839
  source 1..120: mol_type = other DNA

SEQ ID NO: 122000 - DNA, 120 bp, synthetic construct; identical to SEQ ID NO: 35840
  source 1..120: mol_type = other DNA

SEQ ID NO: 122001 - DNA, 120 bp, synthetic construct; identical to SEQ ID NO: 35841
  source 1..120: mol_type = other DNA

SEQ ID NO: 122002 - DNA, 120 bp, synthetic construct; identical to SEQ ID NO: 35842
  source 1..120: mol_type = other DNA

SEQ ID NO: 122003 - DNA, 120 bp, synthetic construct; identical to SEQ ID NO: 35843
  source 1..120: mol_type = other DNA

SEQ ID NO: 122004 - DNA, 120 bp, synthetic construct; identical to SEQ ID NO: 35844
  source 1..120: mol_type = other DNA

SEQ ID NO: 122005 - DNA, 120 bp, synthetic construct
  source 1..120: mol_type = other DNA
agagcccaccctcacagcagaataaaggacatggaatcaagaattattttcaaactttgaggtttaatagctgccctgctgagtttctgacatgtgtggggcctgtaatcccttttattg

SEQ ID NO: 122006 - DNA, 120 bp, synthetic construct; identical to SEQ ID NO: 35845
  source 1..120: mol_type = other DNA

SEQ ID NO: 122007 - DNA, 120 bp, synthetic construct
  source 1..120: mol_type = other DNA
gttaagagggaaatttatagcactaaatgcccacatcagaaagctagaaagatctcaaaaatgacagcctaacatcacaattagaagagctagaggagcaacaacaaacaaatccaaaag

SEQ ID NO: 122008 - DNA, 120 bp, synthetic construct
  source 1..120: mol_type = other DNA
acgaaaatgccaaaagcatttgcaacaaaagtcaaaactgacagatgggatctaattaagctaaagagcttctgcacagcaaaagaaactatcatcagagtgaacaggaaacctacagaa

SEQ ID NO: 122009 - DNA, 120 bp, synthetic construct
  source 1..120: mol_type = other DNA
agggagagcattacgataaacagctcattcatgtggagcttaaaacctaaatgacgggttgctaggagcagcaaaccaccagggcacaggtaaaccttgcaacaaacctacacgttttgg

SEQ ID NO: 122010 - DNA, 120 bp, synthetic construct
  source 1..120: mol_type = other DNA
ccatacccctacataaccaatgtgtccaagaagaaatcacaaagggaattgaaaaatacttggagaagaacgaaaatgaaaatacaatcagggatgcagcaaaagctaagctcagataaa

SEQ ID NO: 122011 - DNA, 120 bp, synthetic construct; identical to SEQ ID NO: 35846
  source 1..120: mol_type = other DNA

SEQ ID NO: 122012 - DNA, 120 bp, synthetic construct; identical to SEQ ID NO: 35847
  source 1..120: mol_type = other DNA

SEQ ID NO: 122013 - DNA, 120 bp, synthetic construct; identical to SEQ ID NO: 35848
  source 1..120: mol_type = other DNA

SEQ ID NO: 122014 - DNA, 120 bp, synthetic construct; identical to SEQ ID NO: 35849
  source 1..120: mol_type = other DNA

SEQ ID NO: 122015 - DNA, 120 bp, synthetic construct
  source 1..120: mol_type = other DNA
ctcagctgtcccaccatgtgcccttggtgaaatcactttaacttgtttcctctactgtcaaatggagagtatggttaattctctgcttacctctcagagctaaagtgagatgaaatactt

SEQ ID NO: 122016 - DNA, 120 bp, synthetic construct
  source 1..120: mol_type = other DNA
acgcctgtaatcctaacagtttgggaggccgaggcgggtggatcacttgaagccaggagttcgagaccagcttggccaacattgtgaaaccccatctctactaaaaactacaaaaaaatt

SEQ ID NO: 122017 - DNA, 120 bp, synthetic construct
  source 1..120: mol_type = other DNA
taaaaacaatttctggttttatctcagtggattggggcatggagtctcagttttgatcctttcctgtcagaaaagatggctttctgttggcctacgggttctcccagtaggttccttttg

SEQ ID NO: 122018 - DNA, 120 bp, synthetic construct
  source 1..120: mol_type = other DNA
ctcctgctgattgggaagaaagtgcaccagtgaggtgatggggggctggaactcttaaaggggcagctttatttctgttgaaaatttgtttgcctagcatgttatttttttttctatctt

SEQ ID NO: 122019 - DNA, 120 bp, synthetic construct
  source 1..120: mol_type = other DNA
cttcccaagagagttctagccttaggatttgaaaaatgtgccaatactattccctctgtataacgacacgaagaaggcaaattacatgcctaggactccagaatgctcatgtcctgaaat

SEQ ID NO: 122020 - DNA, 120 bp, synthetic construct
  source 1..120: mol_type = other DNA
gttcccgaaaggcaggggcgggcgcggcgagcccctgccagatccggggatgataacgtgcctgctccatgtcgcggcttctagctgtccaggctccgccccctgtgagtgtgtaagtgt

SEQ ID NO: 122021 - DNA, 120 bp, synthetic construct
  source 1..120: mol_type = other DNA
ggctgaaccgcacgacctcccaggagcttttctctcggagcggcttgccggtctggcctccttgagccccggatgccgcccgcccgaaatgtctcaactttccaggtgcccaacgcccgc

SEQ ID NO: 122022 - DNA, 120 bp, synthetic construct
  source 1..120: mol_type = other DNA
cccctgttgatgtgatattttaggcaatttccttctttaaaaaagggtcatatgcttagccaacagcttcattatgccaatcatgcctcctttagttgcaaatccaagatagtcagaact

SEQ ID NO: 122023 - DNA, 120 bp, synthetic construct
  source 1..120: mol_type = other DNA
gcccccaggagggccaagaaaggaaaaaagaccagcaaagttaacgatcttatttaccttgaatttattcttaacattcacttatggaacagtaagctctgagctgtctctactgcaacc

SEQ ID NO: 122024 - DNA, 120 bp, synthetic construct
  source 1..120: mol_type = other DNA
tcagttctgtaagcacctcccacccagtattgattaggtattgctttgtgacaagccaaggttctttgtggggatgcttaccttttcttcattggaaggaaggaaaggaaagaaaagaaa

SEQ ID NO: 122025 - DNA, 120 bp, synthetic construct
  source 1..120: mol_type = other DNA
tccatccatttatctttcccgttttccctctgtggtctcttaaaagggagactgcctatggtctgttttctttgctagtacagtatgcattctcccgtgtgtttgagcattcattcaaca

SEQ ID NO: 122026 - DNA, 120 bp, synthetic construct
  source 1..120: mol_type = other DNA
aggcctggcggcacacgcgggttctctgtggccagcaggcggcgctgcaggagaggagatgcccaggcctggcggccggcgcacgcgggttctctgtggccagcaggcggcgctgcagga

SEQ ID NO: 122027 - DNA, 120 bp, synthetic construct
  source 1..120: mol_type = other DNA
aaaaccgattaagtagtctaatataaattgcgatcttattaaaaactgatcagattaaaaaaattatggaattatggagccaataagatgttacaacctgttccaaggggaattccaaaa

SEQ ID NO: 122028 - DNA, 120 bp, synthetic construct
  source 1..120: mol_type = other DNA
caatagcgtcccagggcttacacgatctgtaccgatcccagcccagcaactccctggccacctcgctgacttcgctccctctatctctttgctccactggcctccttccagagcctcaga

SEQ ID NO: 122029 - DNA, 120 bp, synthetic construct
  source 1..120: mol_type = other DNA
aaatcaacaactccccgccacctccagggcattttctaatagtgtttgtttttgagacggaatcttgccctgttgcccaggctggagtgcaatggcacgatcttggctcactgcaacctc

SEQ ID NO: 122030 - DNA, 120 bp, synthetic construct
  source 1..120: mol_type = other DNA
aagtgaccatgggtgccaaaggcctaaagagcaggcagggaaatgagactcgggaccactggagccccatgctgcctctgacaagccctggagctctgggtctcaaaggctggctggcaa

SEQ ID NO: 122031 - DNA, 120 bp, synthetic construct
  source 1..120: mol_type = other DNA
gtggcctcatgcccagggccagtctgccgccggtccagggcctcagggccttcgatggctggtgtgggaagccgagggctctcttggctgtggcagggagcggctctcgttggcactgga

SEQ ID NO: 122032 - DNA, 120 bp, synthetic construct
  source 1..120: mol_type = other DNA
aggcaggaggaccctgagttgggagtcctggatctgacagtcctttaacgtgagggtctcaagagtagcagcaactttctctagcagagctccaaggggctcaagattggtggtccacat

SEQ ID NO: 122033 - DNA, 120 bp, synthetic construct
  source 1..120: mol_type = other DNA
aaaacatggcaggtattttgtgggcatctggacaaaaggattgaaagactttttttttttttagattgggtgtcacccagggtggtgtgcagtgttgcaatcttgacctactgcaacctc

SEQ ID NO: 122034 - DNA, 120 bp, synthetic construct
  source 1..120: mol_type = other DNA
caaacaaaaaacaagttttcctctgcctagcaagctcatttcaaggacagttataagataatgctgttggagaagttgaaagaaaggaataggctccagacacccactgctccagagcaa

SEQ ID NO: 122035 - DNA, 120 bp, synthetic construct
  source 1..120: mol_type = other DNA
agtcggttaggaaaagaaaactggaggtggtgagagtggctcacaaccccaattaggaacacacgaactgggagtggggaggtgtgtgaaagtgtgtgaaagatacagttcagggaggaa

SEQ ID NO: 122036 - DNA, 120 bp, synthetic construct
  source 1..120: mol_type = other DNA
acccatttattatgatgaccaaggccaagtcaggtggggggaatggactttcatctatcatcccttttcaaccattgatctcttgaactggaaacaccatactccctcctatatggcaaa

SEQ ID NO: 122037 - DNA, 120 bp, synthetic construct
  source 1..120: mol_type = other DNA
ggaagtagttttgtgctagaaggggttcaagatgccaggtatgcagtaataacattggacttagtagtagatgctctgcctctgcctactggaacatgagctcaaaaggcagaattaata

SEQ ID NO: 122038 - DNA, 120 bp, synthetic construct
  source 1..120: mol_type = other DNA
aaaatggaagttacacacagcctatcagccgcaaagttcagaaaaagtggaatgcatgaaccagacactcaaggagcttctgaagaaatatttccaggaaacctatctgagatgggatca

SEQ ID NO: 122039 - DNA, 120 bp, synthetic construct
  source 1..120: mol_type = other DNA
tctgaaagtgctgggattacaggcatgagccaacacacccagccctatactgtaatcttgtgtactccctctgctgttaaagttgcaggtgttgtgccttggatccaccacagctggctg

SEQ ID NO: 122040 - DNA, 120 bp, synthetic construct
  source 1..120: mol_type = other DNA
gtattagtgtcaatacctacattagtattagtagtggtcttgtttagctgatgaaagcttgtttctctctccttctgggataaaaactcaagacaccctggggatctcgagtgcatggac

SEQ ID NO: 122041 - DNA, 120 bp, synthetic construct
  source 1..120: mol_type = other DNA
acacgaggcgttttacttttccctgccaagtgaaaaaccatgttaatctgtgaggccagctctgtcctggagagttgtcactttctaggtgctcacaccacacacatgtatatatatata

SEQ ID NO: 122042 - DNA, 120 bp, synthetic construct
  source 1..120: mol_type = other DNA
ccttccacaggtgcttctactttaagcttcaagccttctcttccattctgggccttcttgatgctttggggtgcctcccgcaggtgcaacacgcactgtgggtgtgaaccagggatgcca

SEQ ID NO: 122043 - DNA, 120 bp, synthetic construct
  source 1..120: mol_type = other DNA
gtgagatgcaggttcacagcagctctggtcaaccccacagaaacaaatctgaagctcctgggtccggtttaatgagccccaactgcgctctgatccaggagtttgcaggctaacagcaca

SEQ ID NO: 122044 - DNA, 120 bp, synthetic construct
  source 1..120: mol_type = other DNA
actgatacagaactgcagcatgtagctgagattcagatgctttgggtaagcgaggcttgggtactggtagagacacttcaagtcctcttccaataggtagccgcaagttaattccaagtt

SEQ ID NO: 122045 - DNA, 120 bp, synthetic construct
  source 1..120: mol_type = other DNA
ggaccaccaatcttgagccccttggagctctgctagagaaagttgctgctactcttgagaccctcacgttaaaggactgtcagatccaggactcccaactcagggtcctcctgcctgccc

SEQ ID NO: 122046 - DNA, 120 bp, synthetic construct
  source 1..120: mol_type = other DNA
atctattatgacagaaagccaaccagtggttgtctgaggtgtggggagaaaggtgagggaggaattactacgtaaacaaggacactttggaagtggtagatatatccactatcttttttg

SEQ ID NO: 122047 - DNA, 120 bp, synthetic construct
  source 1..120: mol_type = other DNA
aagctgtctagaattgaagctgtctttattcacggatcatgattatgtatgtaaacaattccagaaatctacaaaaatataccaaaactattaagcgagtttggcaatgttgcagaatat

SEQ ID NO: 122048 - DNA, 120 bp, synthetic construct
  source 1..120: mol_type = other DNA
acttggaacatagcaggtacctaattaatgtttattaatgaatgaatggataagtccaaagctttccatgatttctcccctgcagcctcatcttaccaccaccacaagccctccaaacca

SEQ ID NO: 122049 - DNA, 120 bp, synthetic construct
  source 1..120: mol_type = other DNA
aaatatttaatggatggattccctctatttctgccaactttcattccctgaaagaagaaataggtaagcatgacctcacgaacctcagaaggctgagaatggggaattggcacacacagt

SEQ ID NO: 122050 - DNA, 120 bp, synthetic construct
  source 1..120: mol_type = other DNA
catgcctataataccaacaacagtggaggctgaggtgggaggatctaaaggccaggagtttgagaccagcctggacaacatagtgccacccctttggtacgaattttttttttttttttt

SEQ ID NO: 122051 - DNA, 120 bp, synthetic construct
  source 1..120: mol_type = other DNA
gtgtttcgaagaccacgccacaggcgatgagcagaactcttcatgttgaaacggttctgctacagtactagattgctctcaggcgatttggggttgatacaggcaagccggtgcaaaact

SEQ ID NO: 122052 - DNA, 120 bp, synthetic construct
  source 1..120: mol_type = other DNA
ttcttggattattttaacagttaaaatatacaaagtggcccattaaaaacagagttgacttttcaccattgctgtttttctggtgagacatgtggaaaggaaggacaggtggacttttca

SEQ ID NO: 122053 - DNA, 120 bp, synthetic construct
  source 1..120: mol_type = other DNA
taatattgaattaatgttaatagtgtcattttaggtgaactagacttcattgaaggaggtgggagccttatggagagagagtatatgattatctctatttgtatttaattaccatttcat

SEQ ID NO: 122054 - DNA, 120 bp, synthetic construct
  source 1..120: mol_type = other DNA
attgggaagtttaggcaaaagtcatttcttccctatattttgtcatgcttatctcctgtctctttctgttttacagattagcaataaactccttaaaacccaaaggtttgggcttctgtt

SEQ ID NO: 122055 - DNA, 120 bp, synthetic construct
  source 1..120: mol_type = other DNA
tcagggaaatgagtggagcctcacaggcacaagaatctagtaaattctaggtttcttgtgtggaaatcagtgggcaaaatcttaactgagtgaattcttgattattggtatcacatttgt

SEQ ID NO: 122056 - DNA, 120 bp, synthetic construct
  source 1..120: mol_type = other DNA
ccttccaaatgttagtaacttagccttctccttttgaagggttagtctgtaagtgatactggaagccatgtggtaagaaagaggacagaagtataaaatcagactcagaaagtaaaatct

SEQ ID NO: 122057 - DNA, 120 bp, synthetic construct
  source 1..120: mol_type = other DNA
aagatcgagcagaactaaatgaaacagagataaaaaaaatacaaaggatcaatgaaatgaaaagttggttatttgaatgattgatagaccactagctagattaaccaggaaaaaaagatc

SEQ ID NO: 122058 - DNA, 120 bp, synthetic construct
  source 1..120: mol_type = other DNA
atctatgacaaacccatagccaatatcatactgaataggcaaaagttggaagcattccccctaataactggaacaagacaaggatgtccactctcaccactcctattcaacacagtactg

SEQ ID NO: 122059 - DNA, 120 bp, synthetic construct
  source 1..120: mol_type = other DNA
gagaatcccttgaaccagggaggcagaggttgcagtgagccgagatcatcccactgcactccagcctgggagacagagcaagactctgtctcaaaaaaaaaaaaaaaaaaaaaaaaaaaa

SEQ ID NO: 122060 - DNA, 120 bp, synthetic construct
  source 1..120: mol_type = other DNA
cagaagtaattggcacttaatcaatgcaatcattattacagcacatggctactgcagcttcaggccctcttgcaaccactgaactgcaaaagaggagactatgtctgtagaattttacca

SEQ ID NO: 122061 - DNA, 120 bp, synthetic construct
  source 1..120: mol_type = other DNA
gaatttatgggactaggaccctggaatctacattgttagcaagtgtctccagggattcctgtatacactgaaatggagcctactcatctatcttccatagtctaaacagtgctgtgctca

SEQ ID NO: 122062 - DNA, 120 bp, synthetic construct
  source 1..120: mol_type = other DNA
tttcttcaaaaaaagaacctgcaggcgacacaccaaggactccacgagggagtcctgagtactggagcgagttgcggccacgcggccgcagctcaccactggcctagagatgccctttgc

SEQ ID NO: 122063 - DNA, 120 bp, synthetic construct
  source 1..120: mol_type = other DNA
gacctgaaactgatccacagccatacagtcaataaatgagctttcaatgaaagcagttcaatagaagaaaataaatcatttcaattaatggactttcatatggaggtgggggagaccaac

SEQ ID NO: 122064 - DNA, 120 bp, synthetic construct
  source 1..120: mol_type = other DNA
gccagatacaaaagatatgtccattcactcatgtgaactttaagaacaggcaattgtaacctatgggaatagacatcagaatagtgattaactaagaggacacagggtgggaattgcctg

SEQ ID NO: 122065 - DNA, 120 bp, synthetic construct
  source 1..120: mol_type = other DNA
aacaaagttataaatatcaaaatagctcattcatccaaaccaaatgtttttataggaaacttttactaaacaaagttataaatatcaaaatagctcatttgtcggatcaaactcttaact

SEQ ID NO: 122066 - DNA, 120 bp, synthetic construct
  source 1..120: mol_type = other DNA
aatttacaaaggcctcatatgcatctcagagtcacagatgctaaaactcaacacaccggtgagttccctgtcagcaatatgtaccaccctctacctcaaaacccaatgatcagactcaag

SEQ ID NO: 122067 - DNA, 120 bp, synthetic construct
  source 1..120: mol_type = other DNA
catgctctggctccttggctccagaagcttctagaaccagtagggtgatacatcctttagcaactatattgtaaaacacatggtgggtaaaagagtgccctattaagtattttggttatg

SEQ ID NO: 122068 - DNA, 120 bp, synthetic construct
  source 1..120: mol_type = other DNA
ctgtgaaaggacagtgacttcaagtgggaaagagaagggcttcgatctccctcaggaaagacagttgtggcaaaaagtaaagctggtgctctccagaagcatcattccagaggccacacc

SEQ ID NO: 122069 - DNA, 120 bp, synthetic construct
  source 1..120: mol_type = other DNA
tgtcatctttgtaggtttctacacatactccaactcattcaccaatccttgaaaagattatgtaaccaatctcaatgccctgacccaggccaagcccatttctacatgtgcagtgttctc

SEQ ID NO: 122070 - DNA, 120 bp, synthetic construct; identical to SEQ ID NO: 8783
  source 1..120: mol_type = other DNA

SEQ ID NO: 122071 - DNA, 120 bp, synthetic construct
  source 1..120: mol_type = other DNA
gaagcaggtttaacaagcgcaaggccgggcgcggtggctcacgcctgtaatcccagcactttgggaggccgaggcgggcggatcacgaggtcaggagatcgagaccatcccggctaaaac

SEQ ID NO: 122072 - DNA, 120 bp, synthetic construct; identical to SEQ ID NO: 8785
  source 1..120: mol_type = other DNA

SEQ ID NO: 122073 - DNA, 120 bp, synthetic construct
  source 1..120: mol_type = other DNA
taaaaatcgccagatatttactcccgcccgcttaaattactattctggcttggacaccgcctgtagtatgcaatgaggaagatgctgagctttaattaagcttatagttcctaaataaac

SEQ ID NO: 122074 - DNA, 120 bp, synthetic construct
  source 1..120: mol_type = other DNA
gtggccggcgcgctcttgcgggccgctttggtagccagctgcttcctcggggccttgccgccggtcgacttgcgggcagtctgcttagtacgggccatgctgtctcattgatacgagagg

SEQ ID NO: 122075 - DNA, 120 bp, synthetic construct
  source 1..120: mol_type = other DNA
cttaaaacttactttgatggtgtcattatgaactatcttcctactgaagtcaaagtaaagtaaaagtgatttcaaggggacttcctgaacactaaacacaaagtagaaatctgtgagctt

SEQ ID NO: 122076 - DNA, 120 bp, synthetic construct
  source 1..120: mol_type = other DNA
cctcccaaagtgcttgggttacaggcatgagccccacacacccagccaacacagtttaaagcacaaaagcgttttcccatcatgcaatcacatcatctagtatttctcaaacatctacac

SEQ ID NO: 122077 - DNA, 120 bp, synthetic construct
  source 1..120: mol_type = other DNA
agctcaaattttttacaatttctgcctttattatgtaacgtattccactggaatatgtgttacaggaaaggggtcccgatccagacccctagagagggttcttggatatccggcaagaag

SEQ ID NO: 122078 - DNA, 120 bp, synthetic construct
  source 1..120: mol_type = other DNA
agtcagaaaggggcaagcgtgtttcttctctaccctgaagcagccaagggagaagaaggtatctgttgccaacgctggggtgttacaagtgcacactgtcatgcccggctaattttttgg

SEQ ID NO: 122079 - DNA, 120 bp, synthetic construct
  source 1..120: mol_type = other DNA
tgttaattctaagtaaaaactcaacctatcccaattagcccaagaccactacttagtctacctaagccaagtctgttgacttgttacaatgagggagaacacacaacagagaaactggtg

SEQ ID NO: 122080 - DNA, 120 bp, synthetic construct
  source 1..120: mol_type = other DNA
tttggccaaaagcttattgatgtcataaaaccatactcagtttttacttggacacattctcctgctgttcctcatcaaccactttgtgggtttagtcattcaaagtatgtacttactaga

SEQ ID NO: 122081 - DNA, 120 bp, synthetic construct
  source 1..120: mol_type = other DNA
gcaatggaatgaattgtgttccctcccctcccaaattcatatgttgaagccctaactgccaacgtgatggtatctggagatggggcatttgggaaataattagatttagaagagatcatg

SEQ ID NO: 122082 - DNA, 120 bp, synthetic construct
  source 1..120: mol_type = other DNA
ctctcctgcggccatgtgtagtcctactcaccctcacccatagactgaaaacttccttatattcttgggaaattttctcctttccttttcctgctgccttcaaagacattgataatacta

SEQ ID NO: 122083 - DNA, 120 bp, synthetic construct
  source 1..120: mol_type = other DNA
aaatgaaattaatccaccgagtgctagagttggacgggatctcagaaaatgtattgcacaatccccttgttttgaaataaatgcccaaggtcacacagcaagttggtgacttagtcactc

SEQ ID NO: 122084 - DNA, 120 bp, synthetic construct
  source 1..120: mol_type = other DNA
gaaatacaggttcactgtcaataagaattcagtcttgtataaatgatggtataaacagggaggggcattttccctttacagaggcttaatcagcattaattttgagagataggaaagcaa

SEQ ID NO: 122085 - DNA, 120 bp, synthetic construct
  source 1..120: mol_type = other DNA
aggtggcgtaggatatcacatagagagggagctgagtgtgtaaacttgccagctcgggtccctcttcctcttcttaaaaagccactagtttcactgccaagataacccattaatctatta

SEQ ID NO: 122086 - DNA, 120 bp, synthetic construct
  source 1..120: mol_type = other DNA
gtagatgtgagtaatacacaaccagcctccagtgtgctatgcaactcagccagtttattttgaagagaagttggtatgtcacataagctggcaagtcagttaagaaagtatcacccgtat

SEQ ID NO: 122087 - DNA, 120 bp, synthetic construct
  source 1..120: mol_type = other DNA
tgttgtaattgagttatatatagggttcttattttgcacgtctctgtagagtagtagtttccatactgtgcggtatttgcctgttcacttgcctgttcctttgtgagctctcgagggcca

SEQ ID NO: 122088 - DNA, 120 bp, synthetic construct
  source 1..120: mol_type = other DNA
ggtctcaaacttctgacctcaggtgatccaactgcctcggcctcccaaagtgctgggattacaggtgtgagccaccacgcccggcaaaacagcatatctttaattagaacccaacacgag

SEQ ID NO: 122089 - DNA, 120 bp, synthetic construct
  source 1..120: mol_type = other DNA
attgttgatgatttgagtgatgcgaaagattttgatgatggtaactttctataagagatgtagaagcaagaggcccagagaattgatcttgcccttcatctgacacattgtgaccagttt

SEQ ID NO: 122090 - DNA, 120 bp, synthetic construct
  source 1..120: mol_type = other DNA
ttggtctcccaaagacctatcaaactgcagatcttttggctttgtaatatattcagttccacatttattcattcaagatttttgtgtcctcattatgtgccaagtactgggttggacact

SEQ ID NO: 122091 - DNA, 120 bp, synthetic construct
  source 1..120: mol_type = other DNA
gggtgagaggcaagggaagtgatagcattaagagaaatacctaatgtagattatgggttgatgggggcagcaaaccaccatggcacatgtgtacctatgtaacaaacctgcacattctgc

SEQ ID NO: 122092 - DNA, 120 bp, synthetic construct
  source 1..120: mol_type = other DNA
tttcataaggcattcatttccattacattttggatccagagaggaggcaaaggtaaactagctgtgtggacagtttgcatcagtcagtcagtcagatcatcccatgaccatggcatattt

SEQ ID NO: 122093 - DNA, 120 bp, synthetic construct
  source 1..120: mol_type = other DNA
aaatcctgcccaccctttcactttctgtctcaatacattgatgtcctctaacccatttcctgtcttatgtggctttagtgccacttatcaaaattgtgtgcaaatttccttggctaacag

SEQ ID NO: 122094 - DNA, 120 bp, synthetic construct
  source 1..120: mol_type = other DNA
aaaaaagccattcctcccattccttttgttcatgtgtttctattttatgcttacagtatcatcataaatttttgacttggaaaccattctgctaaatagggaatcagtttatttcaaact

SEQ ID NO: 122095 - DNA, 120 bp, synthetic construct
  source 1..120: mol_type = other DNA
agggctatggcaaggcaaacagtcaatgtttgcctcactaaagtgaggctgcagcaccctgaagggatccctggagggggacgtggtccccttgttcccaagcttgtctgcacatgcacg

SEQ ID NO: 122096 - DNA, 120 bp, synthetic construct
  source 1..120: mol_type = other DNA
tgatgctcttcaggaaagggaggtgtctcacaattgcattgaatggaggaaggcacatctttccagtgatccccactctagggctgcattgggaaatcgctcccagggaaaacacaaaca

SEQ ID NO: 122097 - DNA, 120 bp, synthetic construct
  source 1..120: mol_type = other DNA
aggtgactatgacagctctggtaatcctggaagaacccccaggattgaacacagctcttgggctctgattacagccaattaccataatggagagaatatctggattctcccctaatttcc

SEQ ID NO: 122098 - DNA, 120 bp, synthetic construct
  source 1..120: mol_type = other DNA
tgggagcttcagagtcctcaggccaggctggccctggctctgccacctcttggctggaatgccttcaggcacctactgagcctctcaggggctcagcatcctcatctgtgggacacggat

SEQ ID NO: 122099 - DNA, 120 bp, synthetic construct
  source 1..120: mol_type = other DNA
gatcacaaggtcaggagatcgagaccatcctggccaacatggtaaaactactaaaatacaaaaaattagctgggcatggtggtgcgcacctgtaattccagctactcaggaggctgaggc

SEQ ID NO: 122100 - DNA, 120 bp, synthetic construct
  source 1..120: mol_type = other DNA
ccatatctcctttcaactttaagcacataaacggttaggaacaagtagcatgccattagagacttctattcaagttgatattcaggttgatatcaagtattttctaggtatgattgttca

SEQ ID NO: 122101 - DNA, 120 bp, synthetic construct
  source 1..120: mol_type = other DNA
gccttaatgcatgaatatatggccttgtattacttaccagtctgtacatgttgtccgtctctttgtctaccaccaacagtgaagtctgatctccaccctttctaatcatttctaccacac

SEQ ID NO: 122102 - DNA, 120 bp, synthetic construct
  source 1..120: mol_type = other DNA
caactgtaatgtattcaagccaaaaatcagctctgcccattctccatcccaaagcccctcctcttggttacctgttagtggagcaacatcatcccagtcaccaacacttggcaactgatt

SEQ ID NO: 122103 - DNA, 120 bp, synthetic construct
  source 1..120: mol_type = other DNA
tctttctccaaggcactgaggatgtttttacaaaacacaaaccaaattaatatttgataaattaatgtaaacagagagtgaaaagaaaataacaacttatgggcgaatagcagtttatac

SEQ ID NO: 122104 - DNA, 120 bp, synthetic construct
  source 1..120: mol_type = other DNA
cctcccgagtacctgggactacaggtgcccgccaccgcacctggctaaatttttttttttttatttttagtggagacggtgtttcaccttgttagccaggatggtctcgatctcctgacc

SEQ ID NO: 122105 - DNA, 120 bp, synthetic construct
  source 1..120: mol_type = other DNA
caaaaccctatattaacactgcttataccactagtgtgagtctgttcacccttaatatgaaggggcaactcaactggatattttttccatcataaactcatgctgtcccctaccacccct

SEQ ID NO: 122106 - DNA, 120 bp, synthetic construct
  source 1..120: mol_type = other DNA
cgctaaaacatgcccacactgcattattgtgtcatacgccctttctttgcatttgtagaatcagaaagcatctttaccattctctcctcttcagtttgtactattatattagccatcgta

SEQ ID NO: 122107 - DNA, 120 bp, synthetic construct
  source 1..120: mol_type = other DNA
tttttttttttttttgagacggagtcttgctttatcgcccagcctggagtgcagtggcgcaatctgagctcactgcaacctccgcctcccgggttcacaccattctcctgcctcagcctc

SEQ ID NO: 122108 - DNA, 120 bp, synthetic construct
  source 1..120: mol_type = other DNA
ggaattttccatttaatattttcagaccacagttgcctgcaggtaaggtaactgaaactatggaaagccaaacaggataaggggggactcttgtatgtcaacctaggcaagggatcgctt

SEQ ID NO: 122109 - DNA, 120 bp, synthetic construct
  source 1..120: mol_type = other DNA
aaatagctattatgaagaatctcatttttcttgccttttattccttattctgcccttcattttcaccctaagagggctagaagcatcaaccctctggccccctgacctcaaagagtcctc

SEQ ID NO: 122110 - DNA, 120 bp, synthetic construct
  source 1..120: mol_type = other DNA
agaagttattaacaatagctaactttggtgataagactgtaggttgtaaaaagccagactttcatttctcattttaaacccaatgaattatttaaatctaaccctactgcattcattatc

SEQ ID NO: 122111 - DNA, 120 bp, synthetic construct
  source 1..120: mol_type = other DNA
tgtcaacataactgtaaagatgcaaaaccaagaatattttcagatatttacagcaatccatcaacagtcagacgaagggggggcagccaaagtgggggggagtaagaccttttttttgct

SEQ ID NO: 122112 - DNA, 120 bp, synthetic construct
  source 1..120: mol_type = other DNA
aggcagaggttcacatactgtgtgaatgggattcagagtgaggaggagactaggctgggatggggtatttggattggacatgattgcgtttataagaatgagagtgttaaattggatttc

SEQ ID NO: 122113 - DNA, 120 bp, synthetic construct
  source 1..120: mol_type = other DNA
ccttgccctacaattatattccaaataatttcagtattaagtcctttaatagtcactttatatctgagacgtgagacttattgagagagaaggaaagtatagacttggtggcaaaaggaa

SEQ ID NO: 122114 - DNA, 120 bp, synthetic construct
  source 1..120: mol_type = other DNA
taggtcagaggaagagattcagcaaataaagtatgtgaaaaatataaagtagtcagctttttaatagagaaacttgaaaatttagaaaggatgtataaaaagtctgtgtgaaggggtggt

SEQ ID NO: 122115 - DNA, 120 bp, synthetic construct; identical to SEQ ID NO: 35742
  source 1..120: mol_type = other DNA

SEQ ID NO: 122116 - DNA, 120 bp, synthetic construct
  source 1..120: mol_type = other DNA
tcacgttagtcaagattattacaaaattcatctgaaagcttgcttctccttgtagtctttccccaattccactggcagccctcccaaaggacccctgcaagacaaagtccgaaatggttt

SEQ ID NO: 122117 - DNA, 120 bp, synthetic construct
  source 1..120: mol_type = other DNA
gtccattttcacactgctataaagaactacctaagactgggtgatttataaacaaaacagctttaattgactcgcagttccacatggctggggaggcctcagaaaacttacaaccatggc

SEQ ID NO: 122118 - DNA, 120 bp, synthetic construct
  source 1..120: mol_type = other DNA
tcatgttcgttttccagctttctgttatagtgtggtctacagagaccttgatcttctgaacatcccacagatccacagatggtatgctggtgcactacactggtagcacatgctgattga

SEQ ID NO: 122119 - DNA, 120 bp, synthetic construct
  source 1..120: mol_type = other DNA
gcagtagaattgcttgaacacgggaggtggaggttgccgtgagccgagatcctgccattgcactccagcctggccaacaaaagcaaacctccatctcaaaaaaaaaaaacaacaacaaaa

SEQ ID NO: 122120 - DNA, 120 bp, synthetic construct
  source 1..120: mol_type = other DNA
caaaataattgaaagcaaggtctcatagaaatatgtgtacactgatatttatagcagtggtattcacactcgtcaaaagatggatgcagccgaattgtccataggcagatgaattgataa

SEQ ID NO: 122121 - DNA, 120 bp, synthetic construct
  source 1..120: mol_type = other DNA
acctgaaaaaaatacttgaacttcctagaacataagctcataaaagcaagaactgtgctccacctctcctctcctctaccccagcactcagaagagaaacagagtcagcatccagtgagt

SEQ ID NO: 122122 - DNA, 120 bp, synthetic construct
  source 1..120: mol_type = other DNA
cacatgagtatattacaaagggaaaagaaggaatgtgatttctcatgattgaaagcttgatttagatcgcatacagcttttgctacccaagaccaagcggctctggcaagacagggttgt

SEQ ID NO: 122123 - DNA, 120 bp, synthetic construct
  source 1..120: mol_type = other DNA
gctgacattattacttcacatccagttcaatttataaattaagagaggtgccatgggcctggtacggtggctcacccccataatcccaacactttgggaggccgaggcaggtggatcacg

SEQ ID NO: 122124 - DNA, 120 bp, synthetic construct
  source 1..120: mol_type = other DNA
agagcttctcctcatatttggaacggatccaccattccttctcttccctcgtggactttattgagggttttgtctgcccctggctgctcccttcccagatgctgttggctagctcattgc

SEQ ID NO: 122125 - DNA, 120 bp, synthetic construct
  source 1..120: mol_type = other DNA
gggtcctcctggctggtgctgggagtcggtggaatggaggaggaatagttatttaaactcccacctccatttcttttcttcataatgtgcacggtggaaacctgtgtggaacaggaggag

SEQ ID NO: 122126 - DNA, 120 bp, synthetic construct
  source 1..120: mol_type = other DNA
tttacaaattcttctcctggatcctgacttgcagagggtttcctgacttcttctttctcagcacatcatggtctgtaccgtgaagccttttatatgataaccagtcagaaatgcccatga

SEQ ID NO: 122127 - DNA, 120 bp, synthetic construct
  source 1..120: mol_type = other DNA
tttttcgttgacacttgccatgattgtataaaagcaaaagtaggtacaatggctggtttctcagcataaatcaaggcagtggtaccaattacattagtagtccctttcactgtcccctac

SEQ ID NO: 122128 - DNA, 120 bp, synthetic construct
  source 1..120: mol_type = other DNA
caccttctaccaactacatatttgcatgaggttaggtcatcttattgcttctttttctctttttttgagacagagtctctctctgtcacccaggctggggtgcaatggcaagatctcggc

SEQ ID NO: 122129 - DNA, 120 bp, synthetic construct
  source 1..120: mol_type = other DNA
atgcacaagacagtcctcacaacaaagcattatctagcccataatatcaacagtggtaaggctgtgaaatcgaaactaaaaatagattttgaaaaaatttcaattgtataattctaccac

SEQ ID NO: 122130 - DNA, 120 bp, synthetic construct
  source 1..120: mol_type = other DNA
tcctgcctcagcctcccaagtggctgggattacaggcatgtaccaccacacccagctaattttgtagagtgaggctcaaaacaactgagggaaggtaaatctcaattctactaataggtc

SEQ ID NO: 122131 - DNA, 120 bp, synthetic construct
  source 1..120: mol_type = other DNA
tgctcaaagatttaagagacttggctgactacagacatttagtgattactcaataggtcccaaagctcaggacttgagacagagtttgagttcagtttttgtttgaaacacaatttcctc

SEQ ID NO: 122132 - DNA, 120 bp, synthetic construct
  source 1..120: mol_type = other DNA
catggagtgtaagacatatcttagtgctttgtcatttgacattttaactgagaaaataatacactttgataagtttgacttacagttcccttccccttcaggtatctgctgtgcgtttca

SEQ ID NO: 122133 - DNA, 120 bp, synthetic construct
  source 1..120: mol_type = other DNA
aaagtactgggattacaggcgtgagccacggcgcccagtccttctattatttatttactacgataaaatgtagtgtattaaataatcctgctacaagagcactttattgcagtgaataca

SEQ ID NO: 122134 - DNA, 120 bp, synthetic construct
  source 1..120: mol_type = other DNA
ttttaacccattaaaaatactaaagttgttttccttgtagacatctttcacctccttggttaggtctattccgaagtactttattttattttagtttatttttgcagctatcagaaaagg

SEQ ID NO: 122135 - DNA, 120 bp, synthetic construct
  source 1..120: mol_type = other DNA
gtgagccaccgtgcctggcccgattatctttttgatatgccgttgggaactacaaaacattgctgaatgaagtcatggacacagacaaatggaaagacacccatgctcatgaatgggtag

SEQ ID NO: 122136 - DNA, 120 bp, synthetic construct
  source 1..120: mol_type = other DNA
ctcgatggaagtaagactattattctaagtgaaataactcggcatggaaaaccaaatatcatgttctctttcagatgtgggagctaagctatgaggatgcaaagccataagaatgataca

SEQ ID NO: 122137 - DNA, 120 bp, synthetic construct
  source 1..120: mol_type = other DNA
cgtctccctctggaagcctcattagtcataaaataaaggttacacccatgaccagcacagaaggttgacagagataatttttagtaaatgctgagacataaaaagtagacaaaggagtgg

SEQ ID NO: 122138 - DNA, 120 bp, synthetic construct
  source 1..120: mol_type = other DNA
aaaaaaatagaaggggaaaaattaaaaatcaatgcaggtgtactggtctaagcagcctagcatctgaagaacaagactatcagtaaaaaagtaacagagaaaataaaaaaaaaattctca

SEQ ID NO: 122139 - DNA, 120 bp, synthetic construct
  source 1..120: mol_type = other DNA
gcactccagcctgggcaacagagcgaaactctgtctcaaaaaaaaaaaaaaaaaaaaaagtgcctgaaatatttaatcttatttttaatgaaagaacaaaaatagaatagttaagttaat

SEQ ID NO: 122140 - DNA, 120 bp, synthetic construct
  source 1..120: mol_type = other DNA
agatgcttacagggattctgttgcatctagagataggtgtctggtcaggaagtagttcttagagctgttagctcttagagtctgataattaaagtaagctatgtataaatgcagaatgag

SEQ ID NO: 122141 - DNA, 120 bp, synthetic construct
  source 1..120: mol_type = other DNA
gaggcatttgggtaatggcagtggattccttatgaatggcttggtcccatccccatggtaataagcaaattctcattatggtaatttaaaaggctgtggtactggccaggtgcggtggct

SEQ ID NO: 122142 - DNA, 120 bp, synthetic construct
  source 1..120: mol_type = other DNA
agcataaacttggatgtggtaaatgaatgtggtcagaggtctgcgtaagaggaggcccaaatcacagattcaatccctgatgataaacaactatgttttttaatttgtttaaatgaaaac

SEQ ID NO: 122143 - DNA, 120 bp, synthetic construct
  source 1..120: mol_type = other DNA
agtaaattcatcatatctgtcacttccatttcattctgaggacacagaaccttagttctcttgagtagctgtcttccatagtcatgtgatatctctaagttttcatttcttcattagcaa

SEQ ID NO: 122144 - DNA, 120 bp, synthetic construct
  source 1..120: mol_type = other DNA
caggtccaagcaattctcccgcctcagccttgtgagtagctggaactacagtcatgcgccactacgcccagctaatttttgtattttcttttttagtagagacagcgtttcaccatgttg

SEQ ID NO: 122145 - DNA, 120 bp, synthetic construct; identical to SEQ ID NO: 42023
  source 1..120: mol_type = other DNA

SEQ ID NO: 122146 - DNA, 120 bp, synthetic construct
  source 1..120: mol_type = other DNA
cacaacaactgcctgaagagagaacagacggagctcctcctccttctgtagtcacctacagactgaagcccactggccccaggtgggagcccaggcatgtggcacacaatgccccacccc

SEQ ID NO: 122147 - DNA, 120 bp, synthetic construct
  source 1..120: mol_type = other DNA
cccagctagtctgaattccccagttgcttaagcatgattatcagaaagtatagcagtctgttttcacactgatataaagaaatacctcaggttgggtaatttttaaaggaaagaggttta

SEQ ID NO: 122148 - DNA, 120 bp, synthetic construct
  source 1..120: mol_type = other DNA
ggcgtgatcttggctcactgcaacctccgcctcccgggctcaagcgattctcctgcctcagcctcccgagtagctgggattgcaggcatgcgtcaccatgcccagctaattttgtatttt

SEQ ID NO: 122149 - DNA, 120 bp, synthetic construct
  source 1..120: mol_type = other DNA
gtgcgtgtagtggtctgtataataaagactgaaggaagcaaccaaaccaattaagagactttctctaaaggcagagtaatgctaagggcagtggcagtgacaaaagtggaggaaaaagtc

SEQ ID NO: 122150 - DNA, 120 bp, synthetic construct
  source 1..120: mol_type = other DNA
tattatcccaatgcagagtcaaattttgccaggaaggcaggaaagctacaaattagctatggcaacttagtgattgggcttgtgtgtgtgtgtgagtgagctggatgtcaggcagtgggc

SEQ ID NO: 122151 - DNA, 120 bp, synthetic construct
  source 1..120: mol_type = other DNA
ttgctcgaattgcttttcaagttacccacttttagggaagacattatttgggttttgtttagtgtatcaggctttttttagttagttgtatcaagaagtgtagacttttctatacataat

SEQ ID NO: 122152 - DNA, 120 bp, synthetic construct
  source 1..120: mol_type = other DNA
ccttgaactcctggctcaagtgaccttcctgcctcaacgtcctgagtacctaggactgagaggtgaatgccaccatgcctggctaatttaaaaaaataaataaattcatagagaagagga

SEQ ID NO: 122153 - DNA, 120 bp, synthetic construct
  source 1..120: mol_type = other DNA
tataggccttataacatcaattgggaagtttctttttctattttctgagtatgtgtatcatttcttcattgaatatgcaaaataacttaccagtgaagtcatgtggtcctgtatatttcc

SEQ ID NO: 122154 - DNA, 120 bp, synthetic construct
  source 1..120: mol_type = other DNA
cttacagttataagaaataatatagagagatttcttgtaaccttatctcagttctcccagtggtaacatcttgcaaaagtatagtacaatatcataaccaatatgtggaggttgatatag

SEQ ID NO: 122155 - DNA, 120 bp, synthetic construct
  source 1..120: mol_type = other DNA
aaggaaggagcacctttttactgtcaagttgagatgaaggtcaaggttccccattaggcctcctttgccacacaaaaagtaaatactctgtgtttttaagataaagtgatggatgccaag

SEQ ID NO: 122156 - DNA, 120 bp, synthetic construct
  source 1..120: mol_type = other DNA
ccgccccggcgagaacaggcccggcgggcaaggcggcggcggaccgagggaggcctggcccggcagcggggagaagggtgcggcgcagcccgagtttcccaccttttatcctggcccaga

SEQ ID NO: 122157 - DNA, 120 bp, synthetic construct
  source 1..120: mol_type = other DNA
gagcgttagccacccagcattgagctgccagcggctgttctccctaagcaccctcgctcacgtcgcctcgcctcgcctgaccggccgcagccttggataccagccttaaatcgagccgac

SEQ ID NO: 122158 - DNA, 120 bp, synthetic construct
  source 1..120: mol_type = other DNA
gctggtcgcaaactcccgaccttaggtgatacgcccacctcggcctcccaaagtgctgggattacaggcgtgagccaccgtgcccggccgacaggtgttttttatgagttacagactatg

SEQ ID NO: 122159 - DNA, 120 bp, synthetic construct
  source 1..120: mol_type = other DNA
ggataaattttgaccatacctgaataaatatttataatataactgttgagagtatacaagtttaatattttagggaaatacaatgtcaaattctatcaagctctattctcaaactaaaac

SEQ ID NO: 122160 - DNA, 120 bp, synthetic construct
  source 1..120: mol_type = other DNA
tgacaattattgaacaaattacttgttggagatggagttgcagacaaaacaaatatttaccactgctttaaaatacatttattgtactcaggagaagagtctggaactgtggtttcagaa

SEQ ID NO: 122161 - DNA, 120 bp, synthetic construct
  source 1..120: mol_type = other DNA
taaacagagttcataagtcttagtagatgctgccatgtgtaggcgggttgtcttctctaattatcctcagtccccaccattccatagtgcccccagtagagatattactgacatttttca

SEQ ID NO: 122162 - DNA, 120 bp, synthetic construct
  source 1..120: mol_type = other DNA
agtgactgatgagggcctgtttctttgtttgcacatggccattttctcattgtatactgacatggcagagactgagagagagaaagagattatctctttgatgtctcttcctataagagt

SEQ ID NO: 122163 - DNA, 120 bp, synthetic construct
  source 1..120: mol_type = other DNA
ttttctttttaaaataaaagtgttagaggcaaaaaacagccataactaaaccaagtacagataaaggaaataagaatgagaaacagtgtatgtgtgtgtgtatgtgtgtgtgtgtatatg

SEQ ID NO: 122164 - DNA, 120 bp, synthetic construct
  source 1..120: mol_type = other DNA
atctagaactagaaataccatttgacccagtaatcccattactgggtatatacccaaaggattataaatcattcttctataaagacatatgcacatgtatgtttattgcagcactattca

SEQ ID NO: 122165 - DNA, 120 bp, synthetic construct
  source 1..120: mol_type = other DNA
cagaatacctacacacacacacacacacacacacacacaaacacacaaactaaagaactttttctgttatatatcaaatcatacttttgttagtgtgtttaattttattttatctttctc

SEQ ID NO: 122166 - DNA, 120 bp, synthetic construct
  source 1..120: mol_type = other DNA
tccatttgtcttattttaaatccatattttaacgttcaaaatattatttcatggatattttgccacacgattatgctagtttttactattttctcccctagtgtgtaaaagtacaagaga

SEQ ID NO: 122167 - DNA, 120 bp, synthetic construct
  source 1..120: mol_type = other DNA
gccttgaagccggccggaccctgcagcgcgtaggggaacagcgacgtcttcatctcggccatgttgtgcagcgcggccagcggggcactgctcagcacgaacgcgcccgggcggttagtg

SEQ ID NO: 122168 - DNA, 120 bp, synthetic construct
  source 1..120: mol_type = other DNA
tctccagatgcctggaagggaggccttgaaagtcattcttcttggatgcatgggcccatggcatttcttggtagaaggtcaaagagaagtgttcatgcttggcaaggcaggagggtggga

SEQ ID NO: 122169 - DNA, 120 bp, synthetic construct
  source 1..120: mol_type = other DNA
agccacagcccccacagccggagccacagcccccacagccggagccacagcccccacagctggagccacagcctccggagcagccgcaacagcccatggttctggtggattgagggtgga

SEQ ID NO: 122170 - DNA, 120 bp, synthetic construct
  source 1..120: mol_type = other DNA
ccacaggagccacagctggtgcaggaacaggctggcacccaggagcacacgggcttgcagcagcagacaggcacataacatctggagccacatcccccacagctggagctgcagccccca

SEQ ID NO: 122171 - DNA, 120 bp, synthetic construct
  source 1..120: mol_type = other DNA
cagcagcagacaggtacacagcagccggagccacagcccccatagccggagccacagcccccacagctggagccacagcccccacagctggagccacagcctccagagcagccagagcag

SEQ ID NO: 122172 - DNA, 120 bp, synthetic construct
  source 1..120: mol_type = other DNA
tgtgctgctgtgtgccagcttgttcctgctccagctgtggcaaagggggctgtggctcttgcgggggctccaagagaggctgtgtctcctgtggggtgtccaagggggcctgtggctcct

SEQ ID NO: 122173 - DNA, 120 bp, synthetic construct
  source 1..120: mol_type = other DNA
aaagaggaaaaaaaatagagctctggaaaaatagcgtaaacagtcacaaggaagcgaccctgtattgtgcctgacctctggacaggtatataaagagcccgggctcagggggctccacac

SEQ ID NO: 122174 - DNA, 120 bp, synthetic construct
  source 1..120: mol_type = other DNA
ttttcttttggtgtaacagtatcgcatgagccaagactgtcatgaaactatttggatactgtactctggttccttcatctcctccatctgcatcagcctaaattgtcctagtgagttcac

SEQ ID NO: 122175 - DNA, 120 bp, synthetic construct
  source 1..120: mol_type = other DNA
agttccttaaacataaaactctgtgacactctaaactgcaagacaatgtgacaatgagtatgccagtctgaaaagaacaaaggagcagggttcagaagaactggcctttaccagctctgt

SEQ ID NO: 122176 - DNA, 120 bp, synthetic construct
  source 1..120: mol_type = other DNA
ccaaatggctctgttgcaaggctcggctcgttaacatgcaggcagtaaagtatgtcaggagctctgatttgtcatattaaggaggctatatgactgtggagaggaacattaaaagatttt

SEQ ID NO: 122177 - DNA, 120 bp, synthetic construct
  source 1..120: mol_type = other DNA
aaggaagatccttatctctgaagataccaggacacagagaggaatctgaataaatgggccttgctaggttccccagcttaccatcatcagattacaccctttggtcctcctattatatct

SEQ ID NO: 122178 - DNA, 120 bp, synthetic construct
  source 1..120: mol_type = other DNA
agatttaatctacaggctgtgttctgccctctttccacttgcctttcattcaggaccctaatgaagaggtttatctgattggtttactggagtcctatgtgggatgaatagcttcagcct

SEQ ID NO: 122179 - DNA, 120 bp, synthetic construct
  source 1..120: mol_type = other DNA
aggggtctctggacagtcggtggaggcggcagccctacagagacagccgaaagccagcaacttggaaaaccgcccgaattctgggtttctgcacatccaggctggctccaggtctcttgt

SEQ ID NO: 122180 - DNA, 120 bp, synthetic construct
  source 1..120: mol_type = other DNA
attatcaccaagaagagggagcggctcttttaagagatgggcagtcatcatgtacagagaattgcctgtttaatgcctcttcacagtatttgttgcagagatacattagaaaccgcattc

SEQ ID NO: 122181 - DNA, 120 bp, synthetic construct
  source 1..120: mol_type = other DNA
aaacattttattaaagtaagggagtggtgatgccggagtggctaactggaaaagacttcctttaaagggagcgaggacaaggatgccttgtacgtcttctgtcttaatgtgaatcacact

SEQ ID NO: 122182 - DNA, 120 bp, synthetic construct
  source 1..120: mol_type = other DNA
ggtggccacgaggggacaatcccatcaaaagtgtaaattttatttgatcatgtggcctctctgttgctaatctctcctggaaacatctgccacatttagtgtgtgtatgtgtattcattc

SEQ ID NO: 122183 - DNA, 120 bp, synthetic construct; identical to SEQ ID NO: 70770
  source 1..120: mol_type = other DNA

SEQ ID NO: 122184 - DNA, 120 bp, synthetic construct
  source 1..120: mol_type = other DNA
tattgaactatgactatgctactgcattccagcctgggcaacaggctgcttaaacctggaggggcagagcttgcagtgagccgagatcacgccactgcactccagcctgggcaaaggagc

SEQ ID NO: 122185 - DNA, 120 bp, synthetic construct
  source 1..120: mol_type = other DNA
gtacatttataagccacctatgtccatttttatgaactgattattcacttcctttgtctactttctactgcccttcttataaagatttaagaactttttaaaaagacacctgtgtgaaca

SEQ ID NO: 122186 - DNA, 120 bp, synthetic construct
  source 1..120: mol_type = other DNA
gttgaaagtgcttacatcataaatgctgaagcagcaatcgtaggtctgtgggagcaagaggggagaaaactcaagaagagtgggcagaatacgccatagttacgggtgaagccacacaga

SEQ ID NO: 122187 - DNA, 120 bp, synthetic construct
  source 1..120: mol_type = other DNA
aagttttctacaacgtgtatatattcctataataataaaaaagagtactttatagaaaatatagtcaggccaggcacggtggctcacgcctgtaatcccagcactttgggaggccgaggc

SEQ ID NO: 122188 - DNA, 120 bp, synthetic construct
  source 1..120: mol_type = other DNA
gcaaacgcgacacgtccgcatgtcagagaactgcacggtgattttgccctttggggtgatgcgagtcacagtgccttctccaaactcatcgtgcataacttgaccgcccaggcgcaggcg

SEQ ID NO: 122189 - DNA, 120 bp, synthetic construct
  source 1..120: mol_type = other DNA
cacaggtcaggggcacattctacaagggaaaaacagctgatacagaagcctgaaaggtaaagtgggcagagcacctgtacaggactcttacctgccacagcgagggcacaatgcgccttt

SEQ ID NO: 122190 - DNA, 120 bp, synthetic construct
  source 1..120: mol_type = other DNA
acacctggggtcaagtagtcctcttgccttagcctcctaaagtgctgggatgacaggcctgagccctgcgcccggccagcctcctgtgcgaggttgtggggggactctgtcgtggaaccc

SEQ ID NO: 122191 - DNA, 120 bp, synthetic construct
  source 1..120: mol_type = other DNA
aaagcaaaaaaaaaaaaaaaaaaaaactggttactggcgagtgcagaaccacagtctgggtcgatgacaaattatccagcatgaatcttggtgtgacttaggcccctcttagtcctctaa

SEQ ID NO: 122192 - DNA, 120 bp, synthetic construct
  source 1..120: mol_type = other DNA
agggcagcttatatcagagctccgctctttttctttttcttttttttttttaagacagagtctcactgttgcccaggctggagtgcagtggcaccattttggctcactgcaacctccacc

SEQ ID NO: 122193 - DNA, 120 bp, synthetic construct
  source 1..120: mol_type = other DNA
ccttgtttggaaatagggccgctgcagatgtaatcagtttgatgaggttgaatgatgtccttatgaaaaggggagatttggaggtgactcacacacagggagaatgccatgtgaagatga

SEQ ID NO: 122194 - DNA, 120 bp, synthetic construct
  source 1..120: mol_type = other DNA
tgagaggaaaatgcagaaagtcagttccagacagatcgccggatcccacagccactccatgcacctgcatcggaggtgcctgggagcttatttaaatggcaggttccgaggacagagtgc

SEQ ID NO: 122195 - DNA, 120 bp, synthetic construct
  source 1..120: mol_type = other DNA
tgagttaatgcacagacagggctttgcagcaagtcctgacccctcaatccctcaccggccttgcaagagcagaaacctgaaacaagtaccagcacctgcacattcccttttcttcagttt

SEQ ID NO: 122196 - DNA, 120 bp, synthetic construct
  source 1..120: mol_type = other DNA
tatgttgcccaagttggtctcaaactcctgagctcaagcaatccacccgcctcagcctcccaaagtgctaggattacagcctggcctgatacgtatttttgaatggattaatttgaactc

SEQ ID NO: 122197 - DNA, 120 bp, synthetic construct
  source 1..120: mol_type = other DNA
ttaagatggcactattccccagaacaatctacagattcaatccctagcaaaaatcccaatggtcttttttgcagatatggaaaagccagccttgaagttcatatgaaaattcaacggaac

SEQ ID NO: 122198 - DNA, 120 bp, synthetic construct
  source 1..120: mol_type = other DNA
gtttctacctgattgagtctcactatccttattattattttttgtagcatcatcaactgtgttgaatcctcctctttttttttgagacggagtctcgctcttgtcacccagactggagcg

SEQ ID NO: 122199 - DNA, 120 bp, synthetic construct
  source 1..120: mol_type = other DNA
gcttccaaagctaccactgggttttcccctgcaaactgagctgaaagaaaaagggaaaaagcaacaggagttcaattcagcttgcctgaagagctataggagaaacagtgagtaggaaat

SEQ ID NO: 122200 - DNA, 120 bp, synthetic construct
  source 1..120: mol_type = other DNA
aacagaaagcatgcagcatgactccagacataacaccaccccaacgagactgaattcaaatccaaccaaacctctagatctaaccagcagattaatgtaactaacagaagaatatgttgg

SEQ ID NO: 122201 - DNA, 120 bp, synthetic construct
  source 1..120: mol_type = other DNA
aaaaaaaaaagaacagttcccaggctagaaaactgagcataaaaaaggaagtgaagaaaaggtaaagagagagcgagctctgggacatggtgctctctgctgcagtcaaacacgattcag

SEQ ID NO: 122202 - DNA, 120 bp, synthetic construct
  source 1..120: mol_type = other DNA
tcctagtagatttcacaactgagaaacttagtatttgatatttacctacttcaatttcacacgaattgcttccatccattgagtcccaatgcttgcgtacccatgggaaaagggagggtg

SEQ ID NO: 122203 - DNA, 120 bp, synthetic construct
  source 1..120: mol_type = other DNA
taaaataaatttcatgtaagttttttaataaaaaaaaagttggctgggtgcggtggctcacacctataatcccagcattttgggaggccgaggcgagcagatcacaaggtcaggatttcg

SEQ ID NO: 122204 - DNA, 120 bp, synthetic construct
  source 1..120: mol_type = other DNA
tctgaattggggatcctatcactgcaaacaaacaatagaaaataaagaaataaaggccaggtgtggtggctcacaccggcaatcctagcaatttgggaggccaacgctggcagatcacca

SEQ ID NO: 122205 - DNA, 120 bp, synthetic construct
  source 1..120: mol_type = other DNA
agactgttacaacacagcttccctagctaataatacctgagaaaacctgcacatgtggcatatatgtgtcgctaccttttagcatatataatgggtttattaatatttcttcatagcatt

SEQ ID NO: 122206 - DNA, 120 bp, synthetic construct
  source 1..120: mol_type = other DNA
aactgagaaaaaggcatgcattggaggcaacaatccttggaatgtgattgactgtagagaataatgaatgtggaagacccagaacagactttaaaatgttaagcccaaatgactgtctga

SEQ ID NO: 122207 - DNA, 120 bp, synthetic construct
  source 1..120: mol_type = other DNA
ccaggttctctccttttccacttccagtactttgaaggttacgtgcaatgtgtgtcataggttaatgatagaggagtttattctgactgacattgaactttatgggagcaacccacaaac

SEQ ID NO: 122208 - DNA, 120 bp, synthetic construct
  source 1..120: mol_type = other DNA
ttgatccttgctgtgtgattttgcttaagccaaaggggtatcttagaggatttcaggcaacagaagcctggcatgtttttgcacaggcaggttgcactcctgacttttgccataacaata

SEQ ID NO: 122209 - DNA, 120 bp, synthetic construct
  source 1..120: mol_type = other DNA
aaaaacacaatgtttattaatatactccaaagtttttctttttttttttttgagacggagtctcactctgtctcccaggccggagtgcagtggcgcgatctcagcttactgcaacctccg

SEQ ID NO: 122210 - DNA, 120 bp, synthetic construct
  source 1..120: mol_type = other DNA
cgtctttttaataagtttcaggcctggtttgataatatattcccagatgcataatttaaaaatgatcttttggccgggtgccgtggctcaagcctgtaatcccagcactttgggaggccg

SEQ ID NO: 122211 - DNA, 120 bp, synthetic construct
  source 1..120: mol_type = other DNA
cttatacaatctcagagcttaagtactatccacatgctagtgcttacaaacatacactttcagttgtgtggtctccctgagttctgcacatccctcttgggtatctaataagcatctcac

SEQ ID NO: 122212 - DNA, 120 bp, synthetic construct
  source 1..120: mol_type = other DNA
tgcaaataatgtgctacaatattttaggtaggattatctgataggattaacaaatttatcaagtataacagaaagtaaccacttattatttattattggctataccaaaaaatataggat

SEQ ID NO: 122213 - DNA, 120 bp, synthetic construct
  source 1..120: mol_type = other DNA
tatgtgtatatatatatatatatatatagagagagagagagagagagagagagagaaaccgtttcttaaattatctgtagcactgctatgttattctttactctcccaataccccaagta

SEQ ID NO: 122214 - DNA, 120 bp, synthetic construct
  source 1..120: mol_type = other DNA
gagaaatacctaatgtaggtgtcgggttgatgggtgcagcaaaccaccatggcacgtgtatacctatgtaacaaaactgcaagttctgcacatgtaacccagagcttaaagaataattta

SEQ ID NO: 122215 - DNA, 120 bp, synthetic construct
  source 1..120: mol_type = other DNA
gcccaggagattaaggctgcagtgagctgtgattacatctcattgaccatgtgactatgagtataaaactcatagacctcaagcctgggcaacagagcaagactctgccttaaaaagtaa

SEQ ID NO: 122216 - DNA, 120 bp, synthetic construct
  source 1..120: mol_type = other DNA
tgctcagagaagcaccgttcaaaataaccacgaattgaacattatatttgtataatggtatagtatatagcaatgagaactaacaagttacaactatatgcaaaaagattgacaaatctt

SEQ ID NO: 122217 - DNA, 120 bp, synthetic construct
  source 1..120: mol_type = other DNA
agtcataactataatcaatcagataatgctatatgagtttgaaatgttaatctaacttgccttttccaggtatgcattttaagattaaactcttctcagtaagatcaacgctatccttca

SEQ ID NO: 122218 - DNA, 120 bp, synthetic construct
  source 1..120: mol_type = other DNA
aagcaatgaagggctagtttattatgaagttgttgatagctgattctgtggagactcacaaagaaacaaagaataaattttaatcacactgaatgctaatgtgatagtaaggttgtgatg

SEQ ID NO: 122219 - DNA, 120 bp, synthetic construct
  source 1..120: mol_type = other DNA
aaaaagaagcatgtttatttcatcattttgtacttatacactgtgtgtttccagaaaagcctctgagacagcttagaatgaaaggcacagacgctataaaacaagggcaaaatgacagaa

SEQ ID NO: 122220 - DNA, 120 bp, synthetic construct
  source 1..120: mol_type = other DNA
aacaacttcttttagggtagtagaggtgtgaaatgtgggctctgtcccccatacagagtccctactggggcactgcctagaagagctgtgagaagagggccaccatcctccagaccccag

SEQ ID NO: 122221 - DNA, 120 bp, synthetic construct
  source 1..120: mol_type = other DNA
taactgaagagccactttaagaaggcacagtctagaagtgagcagcattgagtcactgttgtctcccagtcctgggaacatcctgtgccacagtttgctgagctgtcttaatcaccagtg

SEQ ID NO: 122222 - DNA, 120 bp, synthetic construct
  source 1..120: mol_type = other DNA
ctcctcgagacgcaggaccacctcagatctccagtcctgcacctgccggctgagcaaacgaggagacggggagaaaagctgtctgtcgttcctgaaggaacaggacctccgcactccaag

SEQ ID NO: 122223 - DNA, 120 bp, synthetic construct
  source 1..120: mol_type = other DNA
gtttgtttggacggattgacatggagaaatttaattttgataggttctagtacacagaagttaagcttcctaacagccatgagtttacagcttcctctttctgaatttggcagtgttttt

SEQ ID NO: 122224 - DNA, 120 bp, synthetic construct
  source 1..120: mol_type = other DNA
cgccgccgctttttgccaccaccgacgcggctctgagggcgggagcggcacactcggctgccggctctaccggcgtccttgttcgggcggagccgaggggcgctcctggtccagctctcc

SEQ ID NO: 122225 - DNA, 120 bp, synthetic construct
  source 1..120: mol_type = other DNA
ggaatgaactgatgaaatgaaatgataaaatgatgaaatgatgagatgaagtgaaatggtgaaatgatgaaattaaatgatgaaatgatgaaatgaaatgatgaaatgatgaaatgatga

SEQ ID NO: 122226 - DNA, 120 bp, synthetic construct
  source 1..120: mol_type = other DNA
gaagaaatgaaatgatgaagtgaaatgatgaaatgaaatgaaatgatgaaatgatgaaatgaaatgaaaagatgaaatgaagaaatgatacgaaatgatgaaatgaaatgaagtgaaatg

SEQ ID NO: 122227 - DNA, 120 bp, synthetic construct
  source 1..120: mol_type = other DNA
ctgggactacaggtatgaaccaccatgcctggctagtttttgtattttttgtagagacgggctttcaccatgttgcccaggctggtcttaaactcctgggctcaagcaagccacacactt

SEQ ID NO: 122228 - DNA, 120 bp, synthetic construct
  source 1..120: mol_type = other DNA
gagaggtcttcacttggggtggccaagcaggccacccaccctggcctcctgcccctcgggacatcccctccaccctgaggcaatgcctccatgccaaactgcagcctggagaccctggat

SEQ ID NO: 122229 - DNA, 120 bp, synthetic construct
  source 1..120: mol_type = other DNA
tgccacattttcttaatccagtctatcattgttggacatttcggttggttccaagtctttgctattgtgaatagtgccgcaataaacatacgtgtgcatgtgtctttatagcagcatgat

SEQ ID NO: 122230 - DNA, 120 bp, synthetic construct; identical to SEQ ID NO: 50827
  source 1..120: mol_type = other DNA

SEQ ID NO: 122231 - DNA, 120 bp, synthetic construct
  source 1..120: mol_type = other DNA
cctccatgtacctctggtagaattcggctgtgaatccatctggtcctggactctttttggttggtaaactattgattattgccacaatttcagagcctgttattggtctattcagagatt

SEQ ID NO: 122232 - DNA, 120 bp, synthetic construct
  source 1..120: mol_type = other DNA
ctaagtctctttgtaggtcactgaggacttgctttatgaatctgggtgctcctgtattgggtgcataaatatttaggatagttagctcctcttgttgaattgatccctttaccattatgt

SEQ ID NO: 122233 - DNA, 120 bp, synthetic construct
  source 1..120: mol_type = other DNA
cgttctctgtatttcctgaatctgaacgttggcctgccttgctagattggggaagttctcctggataatatcctgcagagtgttttccaacttggttccattctccacatcactttcagg

SEQ ID NO: 122234 - DNA, 120 bp, synthetic construct
  source 1..120: mol_type = other DNA
tttatttatttctcttgcctgatttccctggccagaacttccaatactatgttgaatgggagtggtgagacagggcatccttgtcttgtgccggtttccaaatccaccatgatcaagttg

SEQ ID NO: 122235 - DNA, 120 bp, synthetic construct
  source 1..120: mol_type = other DNA
tgaaattgaattcagttgaatggaatgaaatggaatggagtggactggagtggagtggagtggagtgaagtgtagtggagtgcaatagagaggaatggaatgggatggaatgaaatgaaa

SEQ ID NO: 122236 - DNA, 120 bp, synthetic construct
  source 1..120: mol_type = other DNA
atcgaatggaatggactcgaatggattggaatggactcgaatggaatgaaatggacacgaatggaatcatcctcgaatagactcaaatggaagcatcatcaaatggactcgaatggaatc

SEQ ID NO: 122237 - DNA, 120 bp, synthetic construct
  source 1..120: mol_type = other DNA
gcaacataggcctcaaagtgatcaaaaataacccttttcagattgtacaagaacagagttcccagcctgatcaaagaaaagaaatgcttacttctgtgagatgaatgcacacatcacaag

SEQ ID NO: 122238 - DNA, 120 bp, synthetic construct
  source 1..120: mol_type = other DNA
caaaagaaagtttcaactctgtgagttgagtgcacacagcacaaataagtttctcagattgtttctgtctagattttatgtgaagatattcccttttccaccataggccccaaagcgcac

SEQ ID NO: 122239 - DNA, 120 bp, synthetic construct
  source 1..120: mol_type = other DNA
gtgttgtgtgtatgccactcacagagttcaaccttcctttagacagagcagatttgaaacactctttttgtggaatttgcaagtggagatttcaagcgcttcgatgccaatggtagaaaa

SEQ ID NO: 122240 - DNA, 120 bp, synthetic construct
  source 1..120: mol_type = other DNA
taacttttcttttcattcagcagtttggaaacactctgtttgtaaagtctgccatggataatttgacctctttgaggccttcgttggaaacgggtttttttcatgtaaggctagacagag

SEQ ID NO: 122241 - DNA, 120 bp, synthetic construct
  source 1..120: mol_type = other DNA
ggagatttcaagcactttgaggccaaaagcagaaaaggaaatattttcctataaaaactagacagaatcattctcagaaactgctctgtgatgtgtgcgttcaactcacagagtttaagt

SEQ ID NO: 122242 - DNA, 120 bp, synthetic construct
  source 1..120: mol_type = other DNA
atgtttctactcgattccattcaatgatgattcaattctattccattcgatgattccattaggttccattctatgatcattccattcgagtccattcgaagattccattcgattacatta

SEQ ID NO: 122243 - DNA, 120 bp, synthetic construct
  source 1..120: mol_type = other DNA
cgtttccatccgatgatgattccattcgattcccttcaatgattccattcgattccatttaatgatgattccaatcaattccattcaatgattcaattcaaatccattcgatggtgagtc

SEQ ID NO: 122244 - DNA, 120 bp, synthetic construct
  source 1..120: mol_type = other DNA
gtacatttggtgattcctgtggattccacatgaaagtggctccattcgattccattcgatgataccattcgattcccttcattggtgattccattcaattccattcaatgattccattcc

SEQ ID NO: 122245 - DNA, 120 bp, synthetic construct
  source 1..120: mol_type = other DNA
gttagtgaaatgtatacaacatgcaaaagattcaaaactctgaagggcaacattattatataataaagaagaattaattcacattaactattggggagaaataattattaagaattaatg

SEQ ID NO: 122246 - DNA, 120 bp, synthetic construct
  source 1..120: mol_type = other DNA
acacagctttgtagcctgggaaagagaggctatgccataaaacctagacgtggtaggctgtacaatctaggtgtttgtaatagtctctgtgatgtttgcaaaatgatgaaattgcctatg

SEQ ID NO: 122247 - DNA, 120 bp, synthetic construct
  source 1..120: mol_type = other DNA
gtactttacaatttgaactacagatttgatgaaatccctgcaagtatcccagggattcttgtctagaacctgacaagctgattctaaaatacacatggaatagtcaggaactcaaaatag

SEQ ID NO: 122248 - DNA, 120 bp, synthetic construct
  source 1..120: mol_type = other DNA
ccactttggaaaataatgtgatggcttctaaatattttaaacatagaattgtcatatgacccagaaatttattccaaggtatacacacagattattggaaagaggtgttcaaacacaaat

SEQ ID NO: 122249 - DNA, 120 bp, synthetic construct
  source 1..120: mol_type = other DNA
cactggtaagaccaagggggaagatataaaagaattttggcagttaacatgcggcagatcatgatgggcttgcagaccgttgtaagaattgtattttttagtgtacatgaaatggagaga

SEQ ID NO: 122250 - DNA, 120 bp, synthetic construct
  source 1..120: mol_type = other DNA
gcgttttttctcaagatagaaaagcaattcagataatctgaaatctccacaagaaggatacgaagcacagcagaaagtattctaggcaggaagtcaatcctttcaactgtctgtgctcca

SEQ ID NO: 122251 - DNA, 120 bp, synthetic construct
  source 1..120: mol_type = other DNA
tctgcaaatttaaaaataaagtttaaatgttatttgtcttatttagtaggtctgtgaaaaaaatgcactctttgaaaagtagctgctaccttaattctttatattagacggctggttaca

SEQ ID NO: 122252 - DNA, 120 bp, synthetic construct
  source 1..120: mol_type = other DNA
gagtagccatcttgaaatatgtcaaaaagctggccaggcgcacgcctgtaatccaagcactttaggaggctgaagtgggaagatcacctgaagtcaggagttggagaccagcctgaccaa

SEQ ID NO: 122253 - DNA, 120 bp, synthetic construct
  source 1..120: mol_type = other DNA
gcatttctcacatgaaagttattttcttttctcaatacccataaatgagagtaaacagacataaaatagatcttttccaggatgaagtaaatggaatgaaaaccaaaacccaagctgacc

SEQ ID NO: 122254 - DNA, 120 bp, synthetic construct
  source 1..120: mol_type = other DNA
acaaatatccgccttggggatgaaagtgtgtttccaaatttggtaatccaataatattaataatcacattgattagtccaaattaaaaataaataggggattctcagtacatgctaaaat

SEQ ID NO: 122255 - DNA, 120 bp, synthetic construct
  source 1..120: mol_type = other DNA
gtgcactaaactaacttgttattaaaatacatttttaaacttagtaactaaaactgagtagtactgatttggagtactggaatttaggtatatgggatctcaaaagcacagagctcaaag

SEQ ID NO: 122256 - DNA, 120 bp, synthetic construct
  source 1..120: mol_type = other DNA
gcgcacatggacagaccccacacgccagagtgacctgctcggttgcagcaggagtcaagaaatgtgcctgctggcactcaccccactgactagtgccccgtggaaaacttatttgggtaa

SEQ ID NO: 122257 - DNA, 120 bp, synthetic construct
  source 1..120: mol_type = other DNA
tgtagttcagaagccttaaatgaaactcactgggctaacatcaagttttggacagggctgcattctttctgtgggctatgtggcagaatttattacttgatttttttcagcatccggagg

SEQ ID NO: 122258 - DNA, 120 bp, synthetic construct
  source 1..120: mol_type = other DNA
gaagtctgcaaatataattttggatttttgtagttcacctttgatttctttccgttttgcctcatgtacttggaggttctgttgttagctgcataccctaattagtaggatgtttacatc

SEQ ID NO: 122259 - DNA, 120 bp, synthetic construct
  source 1..120: mol_type = other DNA
tctctttgttgttgtgtttttatcactattgcctaaacaagcagaatatcatacccaggatttaaagccctcgctgcaagattttcaagctcatgtttttatcataagtcactctgcttc

SEQ ID NO: 122260 - DNA, 120 bp, synthetic construct
  source 1..120: mol_type = other DNA
ttcaattccactcaatgttgattccatttgagtccattcaatgattccattcgagtgcattccatgatttcattcgattccattcgatgatgattccattccattcgattagaagattgc

SEQ ID NO: 122261 - DNA, 120 bp, synthetic construct
  source 1..120: mol_type = other DNA
attgcattcgtttccatccgatgatgattccattcaattccattcgatgattattccattcgggtccaatcgatgattccattcgattccattccatgatgattgcattcgtgtccatgg

SEQ ID NO: 122262 - DNA, 120 bp, synthetic construct
  source 1..120: mol_type = other DNA
cccttcgatgatgattcctttgaattccgttcgattatgattccgtatgaatccatttgatgattattccattttattcctctctatgattccattcaattccattcaatgatgattcca

SEQ ID NO: 122263 - DNA, 120 bp, synthetic construct
  source 1..120: mol_type = other DNA
gtgcattatatacttcataagagcttggaaaactctcacccaggtattaccaaatgccaaacatctctgcatgcttgccatgttctccccacagccaaaatccattctaggtaaaatgct

SEQ ID NO: 122264 - DNA, 120 bp, synthetic construct
  source 1..120: mol_type = other DNA
cggatccactggccaggtcgatgcattcaaatacacttgattcaactgtttattccaatgcagaaagcttttcagaagttggagcttttgacatggccttgagcttcttttcattaaagg

SEQ ID NO: 122265 - DNA, 120 bp, synthetic construct
  source 1..120: mol_type = other DNA
actttgcggagacagttttagacacctccatgatttcatccccagctgaaaaagtacagatgctcctatgacttgtgtaagtttctgggtgcagcctcaaaccttggctcaataaacctc

SEQ ID NO: 122266 - DNA, 120 bp, synthetic construct
  source 1..120: mol_type = other DNA
aagtagctgggattacagacatgcgccaccacacccggctaacttttgtatatttagtacagacggggtttcaccatgtaggccaggctggtctcaacctcctgacctgaagtgatccac

SEQ ID NO: 122267 - DNA, 120 bp, synthetic construct
  source 1..120: mol_type = other DNA
tcccatatttcttggtgtgtttcagaatctccaatattattttaatgtataagaatcaactatgaaggagctgactgctgtgtccactgctgtgtccagcatgcgacagtggaggaattc

SEQ ID NO: 122268 - DNA, 120 bp, synthetic construct
  source 1..120: mol_type = other DNA
gactaattataagttcaaaataaaacacaactccgagccagggatagattccagtgtgggggggatttaacttcagtgagaagaggatcttttatttcagaaatggggctgggcgcagtg

SEQ ID NO: 122269 - DNA, 120 bp, synthetic construct
  source 1..120: mol_type = other DNA
ctccaccttctccctcctccagggcgacgataggagcggggcgaacgctccctcccctccccgtgcgttcctagcatccagtgattctgcctcttgcccacgcaggcctgcagtgaacaa

SEQ ID NO: 122270 - DNA, 120 bp, synthetic construct
  source 1..120: mol_type = other DNA
ctcctgttgacctcctgtccctttgcacaattgtaacccgcaggcgagggacagggcctgttcagtcattagtcatcatgagtgttttgtcaactgtttattaatgtatttggggatatt

SEQ ID NO: 122271 - DNA, 120 bp, synthetic construct
  source 1..120: mol_type = other DNA
gttagaaccatcttcttggaggtcggtctgcacctctcctgcagaagaacaatgagctccgctgatgcttttttaaatactatccttgggtgtggtgagaccgtcttgatcctagaaaag

SEQ ID NO: 122272 - DNA, 120 bp, synthetic construct
  source 1..120: mol_type = other DNA
gccgtgcctggccgttttaactgtttttaattgtacagtctgtggcattaagtatgtttacattgttgtgcaaccatcactaccatctatctccagaaccttttcatcttgccaaacaga

SEQ ID NO: 122273 - DNA, 120 bp, synthetic construct
  source 1..120: mol_type = other DNA
tgggagatttggaagatttggaagttattagaagcatgttgagaaggatcaggccattttgccactaattttcctgtttattagttatgcatagttcccatcaacaggggcagagccctg

SEQ ID NO: 122274 - DNA, 120 bp, synthetic construct
  source 1..120: mol_type = other DNA
tgacctagagacatggcaaaagttggtctctactaaaaatacaaaaaattagctgggcattgtggctagtgcctgtagtcccagctacctaggagactgagacatgagaatcccttgaac

SEQ ID NO: 122275 - DNA, 120 bp, synthetic construct
  source 1..120: mol_type = other DNA
aactagaataatcaatgcagagaagtccttaaaggacccgatggagctgaaaaccatggcatgagaactgtgtgacgaatgcacaagcctcagtagccaatttgatcaactggaagaaag

SEQ ID NO: 122276 - DNA, 120 bp, synthetic construct
  source 1..120: mol_type = other DNA
ccccacagatgatcgctgccctgccaaacctgaggaagaagggatgatgataaatatttccattgggtattgttatcctcctatttgcctagtgagagcaccaggatgtttaatgcctgc

SEQ ID NO: 122277 - DNA, 120 bp, synthetic construct
  source 1..120: mol_type = other DNA
ctacggctgctgtagcaggagttgcattgcactcttctgttcagtcagtaaactttgttaatgattggcaaaaaaattctacaagattgtggaattcacaatctagtattgatcaaaaat

SEQ ID NO: 122278 - DNA, 120 bp, synthetic construct
  source 1..120: mol_type = other DNA
ctcctgcccgtccctgggcaatggaatgtctcagtataaaacccgattgtatgctccatcgactgagatagggaaaagccgccttagggctggaggtgggacctgcgggcagcaatactg

SEQ ID NO: 122279 - DNA, 120 bp, synthetic construct
  source 1..120: mol_type = other DNA
cctatttcttcccagataattgagaaatgaatggccagcgctgcaggcttagttttgtggtaaacagttggaacagcctggtcacagtgacttatgcctgtaatctcaccatttgaggag

SEQ ID NO: 122280 - DNA, 120 bp, synthetic construct
  source 1..120: mol_type = other DNA
gcttcccaaagtgctaggattacaggcatgagccaccacgcccagccctgtgtgacctcacttctatgggaaacctaaaaacattgaaccctttgacctagaaagtagaatggtggttac

SEQ ID NO: 122281 - DNA, 120 bp, synthetic construct
  source 1..120: mol_type = other DNA
tagtttgactgccatttcaatttctcctaattcttttggtggatggatggatgatggagagggtagggggtcgggggtggggatgaaggaaaaaaaggcactagagctttattaataagt

SEQ ID NO: 122282 - DNA, 120 bp, synthetic construct
  source 1..120: mol_type = other DNA
caaaacaaaacaaaaaaaacagtgcccagcatgcactgcaagtccaatatgtgtttgacagtatgcagagggaatcagcactacacatggcttgagagtcacaaatctgtttctccaaag

SEQ ID NO: 122283 - DNA, 120 bp, synthetic construct
  source 1..120: mol_type = other DNA
aagaaatgacaaaggggacattactacctaccccacagtaatacaaaacttctgagatttaaacacacacacacacacacacacacacacacacactctatgcaaacacaaactagaaaa

SEQ ID NO: 122284 - DNA, 120 bp, synthetic construct
  source 1..120: mol_type = other DNA
tttcaatttatagaaacaaaaatcttaggatgatgagtttaggataaaccctcagcaaataagcttctacttccaagtgtaaactaaggagtggtgtcccctcgccctttttccagtctt

SEQ ID NO: 122285 - DNA, 120 bp, synthetic construct
  source 1..120: mol_type = other DNA
gaggactccagaaccttctcctaccagctcgcccagagaccaagccaagagagtggtctctgaggagcccgctagaaaggcaaggcgaggcccgcagagaaggatgccaagcctgtagaa

SEQ ID NO: 122286 - DNA, 120 bp, synthetic construct
  source 1..120: mol_type = other DNA
ggtacacttggcactcacatgtggaataaccaccctcacaacctcccccaaggcgagctgccgcggtggaacagtccatggctctgctaggggatgatggcctgaagttctctgaaatat

SEQ ID NO: 122287 - DNA, 120 bp, synthetic construct
  source 1..120: mol_type = other DNA
tatttattatcttttcagatgaaagcaaaacacaatgtcctctgattattcggaacacagtctgatgctgatggcctgtccattgtatccagtgagaaaagaggccaggacactgaggca

SEQ ID NO: 122288 - DNA, 120 bp, synthetic construct
  source 1..120: mol_type = other DNA
tgctggttatttgcaaagaaagggctgagaatcacagtgattatataacctgcccacagtcacaacagtagttaagtaaccacactgggactcgtaactccatatcttgaattctagacc

SEQ ID NO: 122289 - DNA, 120 bp, synthetic construct
  source 1..120: mol_type = other DNA
accaaaaaaaagcaattatgatcacatttaaaatcttattatgtggtggttttctctcctctcctctcctccctttccctcctctcccctcccctcccctctcttctcttcttttctttt

SEQ ID NO: 122290 - DNA, 120 bp, synthetic construct
  source 1..120: mol_type = other DNA
ctttcctgggaagaggtggaagtgctgagctctgcagacttggaagcaagggaaggcccaagctgctggagaggagccgggctaccccatggggatagcccacgctgagctattgcttgg

SEQ ID NO: 122291 - DNA, 120 bp, synthetic construct
  source 1..120: mol_type = other DNA
gaatgaattgtacctttatacacaaagcatgcaagtacttgtgaaagtttttcctcgtttggtggtgtaaggtaggcctcggagtggttttacacactaggtagtagatgggtagtgttg

SEQ ID NO: 122292 - DNA, 120 bp, synthetic construct
  source 1..120: mol_type = other DNA
cggcctcttatagcagtatttctgcattgatctttaatttcttcccctcctattttccaatttgtcttttgttctgcttcttagagattctttgactttctgcgctaacccttctattga

SEQ ID NO: 122293 - DNA, 120 bp, synthetic construct
  source 1..120: mol_type = other DNA
cctcgaacatcatctgcagaagttaagcacctccaatgagtttcccatagagctgctcacaataccacactcaggcaggtcatggggtataaaaaataccttaatgctttattatttgac

SEQ ID NO: 122294 - DNA, 120 bp, synthetic construct
  source 1..120: mol_type = other DNA
tcactttcctctctcctgtgtaacaattattgagatcaaattgtgtttcatcaggaactggactccacctgtgtctaaagccctgagttttggcctctatggagtcatcacctaatgttt

SEQ ID NO: 122295 - DNA, 120 bp, synthetic construct
  source 1..120: mol_type = other DNA
ggaatgcatttcttccccagggttattccttgctgggaaaagaattcagcaatatttctcctactcgcacatccattcataggctttctgcaagaagaaaaatatggctgtattctgccc

SEQ ID NO: 122296 - DNA, 120 bp, synthetic construct
  source 1..120: mol_type = other DNA
gagaattatttgggaccaggagtttgagactagcctgagtaatgtggcaagaccccatctataccaaaaaagaattaaaaattagctgggcatggtggtgtgcacatttcatcccagctc

SEQ ID NO: 122297 - DNA, 120 bp, synthetic construct
  source 1..120: mol_type = other DNA
gcagatcaagatcatgccaggcatgggacaagttagttttgtgacctttgtccatgactccagataatactgtcattctgaatcacctcagtgtatgtctgcaattgaagatatagtgtc

SEQ ID NO: 122298 - DNA, 120 bp, synthetic construct
  source 1..120: mol_type = other DNA
aaccagatgagccaagtttattgcttggagtggtgccacctttgcccagcacagggcctgcaaaatatctcaagcactgatcttaggttttacaatagtgatattattcccaggagaaat

SEQ ID NO: 122299 - DNA, 120 bp, synthetic construct
  source 1..120: mol_type = other DNA
gtatttctacacggttacaacgtactaatggagaaaataaaaagggatagtgaagtgcctttaattcctgtcataagtctagtcctgattagctatctattcatatattatttgaattat

SEQ ID NO: 122300 - DNA, 120 bp, synthetic construct
  source 1..120: mol_type = other DNA
ctgcctttcaaactttaaagaatatccttgtcctgtcacagtggcagtttcaactcttcataatactaaggtgagcagaaacttgtgttatgcccctttgacatagccttgtgggctgga

SEQ ID NO: 122301 - DNA, 120 bp, synthetic construct
  source 1..120: mol_type = other DNA
ggcctcccaaagtgctgggattacaggcgtgagccactgcgccaggccaatgatccatattcttaaaaatgtattgatattctctctgctatgaccataattcagaatatttttaattaa

SEQ ID NO: 122302 - DNA, 120 bp, synthetic construct
  source 1..120: mol_type = other DNA
aaccttatcagaagatcattttcccagctaatcttgccccgatgcattgtatggtctcagcgcttatcaacaaaacaaaagcctgtctataattctaacactgggacacaccgcacctca

SEQ ID NO: 122303 - DNA, 120 bp, synthetic construct
  source 1..120: mol_type = other DNA
gaaagcatatttttaggggtggctgggggaagccatcgtctgggtggagggtggggcctagtctcccctgtagggggggcgggatgtctgagggagtgctggagggtcctcctgtgagtc

SEQ ID NO: 122304 - DNA, 120 bp, synthetic construct
  source 1..120: mol_type = other DNA
gctcaatttccagcccagatcagaacccttggggcgcctgctgaggggagcgcggcctggtgcggggggcggccgcgggctcccggggctgtcaggggacatctgcgccctgtgagctcc

SEQ ID NO: 122305 - DNA, 120 bp, synthetic construct
  source 1..120: mol_type = other DNA
tcttctatggaaaacatctattcaaatcttttgtccatttttaattggtcaattgttgttttattattgaccgataagagttttttatatattctagatactagcttctctgagtttggt

SEQ ID NO: 122306 - DNA, 120 bp, synthetic construct
  source 1..120: mol_type = other DNA
gaagttccaggttgcagtgagctgtaatcctgccactgaactccagccaaggtgacagagcaagaccctgtctctgaaaaaaaaaaaaaaaagatattggcagtgtaagtaactaaattt

SEQ ID NO: 122307 - DNA, 120 bp, synthetic construct
  source 1..120: mol_type = other DNA
cagttggagctcagaggcctggggtaccagtgcagttgtcctctgggagacagtgatggggggttccatccacctccctctcaccatcaccagtgactctcaggaaggaggtgactgtca

SEQ ID NO: 122308 - DNA, 120 bp, synthetic construct
  source 1..120: mol_type = other DNA
aatggaaaattatgccacctactccccactctcctcacagcctgtaagttgggggatggggtgtaattctgccatcagtggtcattctggcatttgagaagagggcttatttcacctagg

SEQ ID NO: 122309 - DNA, 120 bp, synthetic construct
  source 1..120: mol_type = other DNA
gttggaggctcaggaaggtatgcagacactgttctataaggcacatgcccccccaggtgaagtgaggcagacagccctccctcaccagctaggcccatctgattcagctccatccttgtc

SEQ ID NO: 122310 - DNA, 120 bp, synthetic construct
  source 1..120: mol_type = other DNA
tgtcccccttctttattttgcaaagagataaaaacaaaggcagctttgtcacagtgagctacttctcacaggagtcaggatctgcatctgcatactacacaaagacaaacaacacagatt

SEQ ID NO: 122311 - DNA, 120 bp, synthetic construct
  source 1..120: mol_type = other DNA
attgcaatagcaactaggcaatcagccatttgtttccctgcagtcaaaggtcctggaagaggtgtatgagccctaatgtgagtgttgtaaaaagggtacattttactcctaactgctatt

SEQ ID NO: 122312 - DNA, 120 bp, synthetic construct
  source 1..120: mol_type = other DNA
aattgccaagggctagtgatactaggatctcctctaagaacagaaaatagattactcatggcataggtaggaatgtctagagcaggtcatatccaattaatgtcgcctagtaatttttga

SEQ ID NO: 122313 - DNA, 120 bp, synthetic construct
  source 1..120: mol_type = other DNA
gcccaaagatgtgaccttctcagcgtgccccttctcctccctaggcagggtctccttctcagcatatccccttctcctccctaggcagggtctcctcagcttgctcccttctcctcccta

SEQ ID NO: 122314 - DNA, 120 bp, synthetic construct
  source 1..120: mol_type = other DNA
cggataactatattgtaatagttatccggataactatattgtaatagttatccggataactatattgttatagttatccggataactatattgttataggcaactatattgttatagtta

SEQ ID NO: 122315 - DNA, 120 bp, synthetic construct
  source 1..120: mol_type = other DNA
tagcggttcctggtttgaaattctggacctgctatttcagaaacaacttaagcacagcagaactgttccatcttattgcactttaggtgtgatgtaaatgaggcaacaattacagaccca

SEQ ID NO: 122316 - DNA, 120 bp, synthetic construct
  source 1..120: mol_type = other DNA
ccagcatataaacagaggcaaagacaaaaaccacatgattatctcaatagatgcagaaaaagcctttgacaaaattcaacaacccttcatgctaaaaactctcaataaattaggtattga

SEQ ID NO: 122317 - DNA, 120 bp, synthetic construct
  source 1..120: mol_type = other DNA
tgagacaatggggttttctagataaacaatcatgtcgtctgcaaacagggacaatttgacttcctcttttcctaattgaataccctttatttccttctcctgcctgactgccctggccag

SEQ ID NO: 122318 - DNA, 120 bp, synthetic construct
  source 1..120: mol_type = other DNA
tgctttgaatgcgtcccagagattctggtatgtggtgtctttgttctcgttggtttcaaagaacatctttatttctgccttcatttcgttatgtacccagtagtcattcaggagcaggtt

SEQ ID NO: 122319 - DNA, 120 bp, synthetic construct
  source 1..120: mol_type = other DNA
ggttggtgtgtgtgctggtggttggtgcgtgcgctggtggtggttggtgcgtgcgctggtggtggttggtgcctgcgctggtggttggttccttcctgttttagagcagtgcaccactgt

SEQ ID NO: 122320 - DNA, 120 bp, synthetic construct
  source 1..120: mol_type = other DNA
tgactaccgcctctatgaccgacgctggtactacgactgtagccattgttcctaccgcctctgtgactaccgcctctatgaccgacgctggtactacgactgtagccattgttcctaccg

SEQ ID NO: 122321 - DNA, 120 bp, synthetic construct
  source 1..120: mol_type = other DNA
gtgaccgacgctggtactacgactgtagccattgttcctgccgcctctgtgactaccgcctctatgactgatatttctcctgctcctcctattactccctgcactgcttctatcactgcc

SEQ ID NO: 122322 - DNA, 120 bp, synthetic construct
  source 1..120: mol_type = other DNA
ggaacctattctcactccaacaacagctgatcgtcaggtttatgattattataaatgatgaataatgcagtcagtgcctggcaggcgtaggcgtgcggaagctttttatgaatgtgttaa

SEQ ID NO: 122323 - DNA, 120 bp, synthetic construct
  source 1..120: mol_type = other DNA
aaacaaacaaacaaacaaaaccctacacttgtctctggtccagcccagcagccagagtggtgctggtttgtcacgactcgactctggttccctggaaccctgcgtctttctttcttttaa

SEQ ID NO: 122324 - DNA, 120 bp, synthetic construct
  source 1..120: mol_type = other DNA
taacaattaccatatcccttctctccatcctcccttgccctccagttccactactgagaacattctgtgggtgctgacagatgaatcatggcacacgatccccattacagtatcacagag

SEQ ID NO: 122325 - DNA, 120 bp, synthetic construct
  source 1..120: mol_type = other DNA
tatgtctatggagaaacatctgtccagacccatcgcccatctctgcacctttctgctcatttctaaggtgagaaaacagagggtggacaaggtgagggaagagagggtggagaaggcgag

SEQ ID NO: 122326 - DNA, 120 bp, synthetic construct
  source 1..120: mol_type = other DNA
gggtggggaaggcgaggggacagagggtggggaaggcgaggggacagagggtggggaaggtgaccggacagagggtggggaaggtgcggggacagagggtggggaaggtgcggggacaga

SEQ ID NO: 122327 - DNA, 120 bp, synthetic construct
  source 1..120: mol_type = other DNA
tttatgttttacagaaagttttgtgaagagatgacagaaagggttatatcacatccacacagcaataactcctcaaaagcaacttttggccgggtgtggtggctcatgcctgcaatccca

SEQ ID NO: 122328 - DNA, 120 bp, synthetic construct
  source 1..120: mol_type = other DNA
gctaaggtttctgtaatatcacctgtggctctgaggcctgctttggctgagttaattcggtgttgaggtcggtacgtgtgcttgcacacgtttctgaaccacagagactcagatgtgaca

SEQ ID NO: 122329 - DNA, 120 bp, synthetic construct
  source 1..120: mol_type = other DNA
acactggtgacgctcgatggctcggaaggacactggtgacgctcgatggctcggaaggacactggtgacgctcgatggctcggaaggacagtggtgacgctcgatggctcggaaggacag

SEQ ID NO: 122330 - DNA, 120 bp, synthetic construct
  source 1..120: mol_type = other DNA
tgatcctcccgcctcggcctcctaaagtgctgggataataggcaggagccaccgtgcccacgtgcccaccccctgtgccgtatctttctatgtctcttcctatttcttcattctcctttt

SEQ ID NO: 122331 - DNA, 120 bp, synthetic construct
  source 1..120: mol_type = other DNA
acgctgtcatcagacagatcaggaaaacggaatgacatcgagctacacgctgtcatcagacagatcaggaaaacggaatgacatcgagctacacgctgtcatcagacagatcaggaaaac

SEQ ID NO: 122332 - DNA, 120 bp, synthetic construct
  source 1..120: mol_type = other DNA
agggtaggaggcggcctgatgcagggagtgaggcgcaggacagtgagggtgggaaggagcctgatgcagggagtgaggcgcaggacagtgagggtgggaaggagcctgatgcagggagtg

SEQ ID NO: 122333 - DNA, 120 bp, synthetic construct
  source 1..120: mol_type = other DNA
gcagggagtgaggagcaggacagtgagggtgggaaggagcctgatgcagggagtgaggagccggacagtgagggtgggaaggagcctgatgcagggagtgaggagcaggacagtgagggt

SEQ ID NO: 122334 - DNA, 120 bp, synthetic construct
  source 1..120: mol_type = other DNA
gaaatcaattcctttgaaaaggagaacaaaatgagggaaaggaatagggataatgctttagtgttaactataatattttaaatcttttttacagaaagaagtgacatgatcaggtaacaa

SEQ ID NO: 122335 - DNA, 120 bp, synthetic construct
  source 1..120: mol_type = other DNA
tatttcccatcaggctagagtccccagagacaggactgctttcgctcatccaaaagctgtcaagagcatagatcatgagaccatgttcctatcttcccatcagatgacaatctccagagg

SEQ ID NO: 122336 - DNA, 120 bp, synthetic construct
  source 1..120: mol_type = other DNA
gaaggagcaactgattgagtgagtcatctctgaggattcgggctcccacacctgagatcttcccatccatttacggatggaaaagcaaggctcagtcaggggaagtgactgcctaacttc

SEQ ID NO: 122337 - DNA, 120 bp, synthetic construct
  source 1..120: mol_type = other DNA
aacaaggcgccttcccctagaccctccctgcttccggggactattcagacaaatgaagtcaccctccagaatgagccatctgcagcccagggctgttcttctggttgtggcggggtgtat

SEQ ID NO: 122338 - DNA, 120 bp, synthetic construct
  source 1..120: mol_type = other DNA
atagacccacactgcataagggctgagggactgttgtcagtccctcaggtccccttggggcaggcactgtctcttggggtcaggaccggtgtctcctcctttccctggactcagtgcaaa

SEQ ID NO: 122339 - DNA, 120 bp, synthetic construct
  source 1..120: mol_type = other DNA
tcagaggatctgagttgacagaagaggaggaggcgtttcctctgcatcagtgatgcacacttgccccaaggtggccaagagccaggacctctaagcctggtgagcatagagaagcccagt

SEQ ID NO: 122340 - DNA, 120 bp, synthetic construct
  source 1..120: mol_type = other DNA
ctttcataatgatgcaagcactaagaaagcaaggaacccagaagtggttacggttgaaatgaaagaagaccaagagtttgatttgcaaatgacaaaaaatatgaaccaaaatagtgacag

SEQ ID NO: 122341 - DNA, 120 bp, synthetic construct
  source 1..120: mol_type = other DNA
gtagatggaatatacaatcgggttttacaccgagacattccattgctcagggatgagcaggagacagacgccttcctcttatctcaactgcaaagaggccttcctcttttactaatcctc

SEQ ID NO: 122342 - DNA, 120 bp, synthetic construct
  source 1..120: mol_type = other DNA
cacccctttctcattggctcactgccccccgccaagttccccattccaggaggtgtcagggtgggattatacacaagcccagcactgcagacctgaggatctgcgtgggctgagaagctg

SEQ ID NO: 122343 - DNA, 120 bp, synthetic construct
  source 1..120: mol_type = other DNA
ttatttatttggcctcaaatcccctaatatgcctgtgacgcagggctgttattcccatttcccagacaaggaaactgaggctcagagaggctgaatatcctgcccaaggttttgcccctg

SEQ ID NO: 122344 - DNA, 120 bp, synthetic construct
  source 1..120: mol_type = other DNA
ctcttggggtcaggaccggtgtctcctcctttccctggactcagtgcaaaccagacgcagagcgatgtcatgccatggatgagtgtcccccaccacatccgtctccgtagaagacatgct

SEQ ID NO: 122345 - DNA, 120 bp, synthetic construct
  source 1..120: mol_type = other DNA
acaagccctccctggaccttggagctatgacatcccgggagagtgtttctctctgcagggtagatggctgcctggagtcggggacttgcacctgcagcggcatctgcacgactcaaagca

SEQ ID NO: 122346 - DNA, 120 bp, synthetic construct
  source 1..120: mol_type = other DNA
ctgttggtacctgtggggaggggtcctttttttcttaattctcaagcccataagcaatcattgacaatactcaattctgattccttttcttggggccacataaagttttatccctgtctc

SEQ ID NO: 122347 - DNA, 120 bp, synthetic construct
  source 1..120: mol_type = other DNA
ccctccagagcagaacccggcagccgcaggggttgcctgggggcgtgtgttctcgggcaccgcggtaggactgtcctcttgctctgtctcccctgtttctgagcggcctagatgcctctc

SEQ ID NO: 122348 - DNA, 120 bp, synthetic construct
  source 1..120: mol_type = other DNA
ccaggccaccgctctttcaaaggaggagggaggcagagggctcacggatcagtgaatttcgacgaattcttggcttccatacgtgtctcagacagggaagcttcctcggtctccgtgttt

SEQ ID NO: 122349 - DNA, 120 bp, synthetic construct
  source 1..120: mol_type = other DNA
agagtggtccaaaatcgcatctgaagaggagtcctgagaacccagcaggcgccctgaagctccccgtccatcggtggaagtcggctcaaggaggtcctgaagacgggactcctgggggct

SEQ ID NO: 122350 - DNA, 120 bp, synthetic construct
  source 1..120: mol_type = other DNA
ttttacctttccacgccccttctctgcgaaatgaagccacaccaccacacagtcttgaagaggaagcctggaatgggagacggcaacaagccccgtccctggaacgctggcctctctgga

SEQ ID NO: 122351 - DNA, 120 bp, synthetic construct
  source 1..120: mol_type = other DNA
tgcaggagccccagggcttttagaagcgggccaggccaccgctctttcaaaggaggagggaggcagagggctcacggatcagtgaatttcgacgaattcttggcttccatacgtgtctca

SEQ ID NO: 122352 - DNA, 120 bp, synthetic construct
  source 1..120: mol_type = other DNA
ggacagactccctggatcttttggctgtaacgaatgtcaggaaacaaaagggactgcgctgggactggcgctggggctgcgtgcaggggaggttgcgtcagggctagctgggtggtggag

SEQ ID NO: 122353 - DNA, 120 bp, synthetic construct
  source 1..120: mol_type = other DNA
ggggttgcctgggggcgtgtattgctcggccaccgcggtaggactgtgtgtggggctgtgtctcccattctcccttctctctctgtctctcaccctctgtgtgcttctttccctctgtgt

SEQ ID NO: 122354 - DNA, 120 bp, synthetic construct
  source 1..120: mol_type = other DNA
tctttttgtggaatctgcaagtggatatgtggtcctctttgaagatgtctttggaaacgggaatatgttcacataaaaactaaacagaagcattctcagaaacttctctgtgatgtttgt

SEQ ID NO: 122355 - DNA, 120 bp, synthetic construct
  source 1..120: mol_type = other DNA
ctgcaagtggatatttggacctgtctgaggaattcgttgcaaacgggataatttcagctaagtaaacagaagcagtctcagaatcttcttgtgatgtttgcattcaaatcccagaattga

SEQ ID NO: 122356 - DNA, 120 bp, synthetic construct
  source 1..120: mol_type = other DNA
tgaactcacagagctgtactttccttgggaaggagtagtttctcaacacactttctgtagaatctgcaagtggatatttggacctctctgctgaattcgttggaaaccagataatttcag

SEQ ID NO: 122357 - DNA, 120 bp, synthetic construct
  source 1..120: mol_type = other DNA
actcacagagcagtactttccttgggatggagtagtttcgaagcacactttctgtagaatctgcaagtggatatttggacctgtctgaggaatactttgcaaacgggataatttcagcta

SEQ ID NO: 122358 - DNA, 120 bp, synthetic construct
  source 1..120: mol_type = other DNA
gcacattcctttggatggagaaggtttgaaacacactttctgtagaatctgcgagtggatatttggaactctctgaggatttcgttggaaacgggataactgcacctaaataaacggaag

SEQ ID NO: 122359 - DNA, 120 bp, synthetic construct
  source 1..120: mol_type = other DNA
ctttgaggcctgaggtggaaaaggaattatcttcccgtaagaactagatagatgcattctcagaaactactttgtgacgattgcattcaagtcacagaggtgaacattccctttcagaga

SEQ ID NO: 122360 - DNA, 120 bp, synthetic construct
  source 1..120: mol_type = other DNA
tcatattaaaactaaacagaagcattctcagaaacttctctgtgatgtttgtgttcaactcacagagtttcacgttgcttttcatagagcagatgagaaacatgcttttcgtagggtctg

SEQ ID NO: 122361 - DNA, 120 bp, synthetic construct
  source 1..120: mol_type = other DNA
cgtagtaaaggaaataacttcctataaaaacaagacagaagctttctcagaaaattctctgggatgattgagttgaactcacagagcagtactttccttgggatggagtagtttcgaaac

SEQ ID NO: 122362 - DNA, 120 bp, synthetic construct
  source 1..120: mol_type = other DNA
ttcatagagcagatgagaaacatgcttttcgtagggtctgcaagtggacatttcgagagatttccggcttgcggtggaaaacgaattatcgtcacgtaaaaactagagagaagcattgtc

SEQ ID NO: 122363 - DNA, 120 bp, synthetic construct
  source 1..120: mol_type = other DNA
cagagttgaacactacttttgagagcgcagttttgaaactctctttctctggaatctgcaaggggacatccagacctctttgaaggtttcgttggaaacggaatcatcttcacataaaaa

SEQ ID NO: 122364 - DNA, 120 bp, synthetic construct
  source 1..120: mol_type = other DNA
atgcttttcgtagggtctgcaagtggacatttggagagatatccggcctgtggtggaaaacgaaatatcgtcacgtaaaaactagagagaagcattgtcagaaacttgtttgtgatgact

SEQ ID NO: 122365 - DNA, 120 bp, synthetic construct
  source 1..120: mol_type = other DNA
gtggataactgcacttctttgaggcctatcgtagtaaaggaaataacttcctataaaaacaagacagaagctttctcagaaaattctctgagatgattgagttgaactcacagagcagta

SEQ ID NO: 122366 - DNA, 120 bp, synthetic construct
  source 1..120: mol_type = other DNA
cgggataactgcacctaactaaacggaagcattctcacaaaattcttcgtgaggtttgcattcaaatcccagagttgaaacttcctttgatagttcaggtttgaaacactctttttgtag

SEQ ID NO: 122367 - DNA, 120 bp, synthetic construct
  source 1..120: mol_type = other DNA
gcagcattctcagaaaactctttgtgacgactgagttaaactcacagggctgaacattcctttggatggagcagtttggaaacacactatctgtaggatctgcaagcggatactttggcc

SEQ ID NO: 122368 - DNA, 120 bp, synthetic construct
  source 1..120: mol_type = other DNA
ttctcagaaaattctctgggatgattgacttgaactcacagagcagtactttccttgggatggagtagtttcgaaacacactttctgtagaatctgcaagtggatatttggacctgtctg

SEQ ID NO: 122369 - DNA, 120 bp, synthetic construct
  source 1..120: mol_type = other DNA
ttggccttcgttcgaaatgggtacatcttcaaataaaatctagacagaagccttctcagaaacttctctgtgacgattgaattcaactcaaagcgttgaaccctcctatggatagagcag

SEQ ID NO: 122370 - DNA, 120 bp, synthetic construct
  source 1..120: mol_type = other DNA
gagcagtttggaaacacactatctgtaggatctgcaagcggatacttgggcctccctgaggatttcgttggaaacgggataaaccgcacagaactaaacagaagcattctcagaactttc

SEQ ID NO: 122371 - DNA, 120 bp, synthetic construct
  source 1..120: mol_type = other DNA
gaaacactcttgttgtagaatctgctagtggagatttggagcgctttgaggcctatggtagtaaagggaagagcttcacataaaatctagacacaagcattctcagaaaatactttgtga

SEQ ID NO: 122372 - DNA, 120 bp, synthetic construct
  source 1..120: mol_type = other DNA
tttctagaatctgcaagtggacattgggaaggctgtgaggtttgtggtggaaaaggaaatatctccacataaatactagatagaagccttctcagaaactactttgtgatgactgcattc

SEQ ID NO: 122373 - DNA, 120 bp, synthetic construct
  source 1..120: mol_type = other DNA
gagagatttcaggcctgtggtggaaaacgaattatcgtcacgtaaaaactagagagaagcattgtcagaaacttgtttgtgatgactgcattcaactcacagagttgaaggttccttttc

SEQ ID NO: 122374 - DNA, 120 bp, synthetic construct
  source 1..120: mol_type = other DNA
agctaagtaaacagaagcagtctcagaatcttcttgtgatgtttgcattcaaatcccagaattgaaccttcctttgaaagttcaggttggaaacactctttttgcaggatctacaagtgg

SEQ ID NO: 122375 - DNA, 120 bp, synthetic construct
  source 1..120: mol_type = other DNA
ccaagcgttgaaccctcctatggatagagcagttttgaatctctcttttcgtggaatcggcaagtggatatgtggtcctctttgaagatatctttggaaacgggaatatgtacacataaa

SEQ ID NO: 122376 - DNA, 120 bp, synthetic construct
  source 1..120: mol_type = other DNA
caggtggatatttggaccactctttggccttcgttcgaaacgggtacatcttcaaataaaatctagacagaagccttctcagaaacttctctgtgacgattgcattcaactcaaagcgtt

SEQ ID NO: 122377 - DNA, 120 bp, synthetic construct
  source 1..120: mol_type = other DNA
aaacacactatctgtaggatctgcaagcggatacttgggcctccctgaggatttcattggaaacgggatacaccgcacagaactaaacagaagcattctcagaaccttcttcgtgacgtt

SEQ ID NO: 122378 - DNA, 120 bp, synthetic construct
  source 1..120: mol_type = other DNA
cacggattggagcattcctattgacagagcagtttggaaacactcttctcgtagaatcggctagtggagatttggagcgctttgaggcctatggtagtaaagggaagagcttcacataaa

SEQ ID NO: 122379 - DNA, 120 bp, synthetic construct
  source 1..120: mol_type = other DNA
cgtaaaaactagagagaagcattgtcagaaacttgtttgtgatgactgcattcaactcacagagttgaaggttccttttcaaacagcagtttccaaacactctttctgtggcatctgcaa

SEQ ID NO: 122380 - DNA, 120 bp, synthetic construct
  source 1..120: mol_type = other DNA
ttgaagatttcgttggaaacgggataatcttcacagaaaagctaaacagaaacattctcagaaacttcttttgatgtttgctttcaactcacagagttgaactttccttttgagagagaa

SEQ ID NO: 122381 - DNA, 120 bp, synthetic construct
  source 1..120: mol_type = other DNA
gctttctcaaaaaattctctgggatgattgagttgaactcacagagcagtactttccttgggatggagtagtttcgaaacacactttctgtagaatctgcaagtggatatttggacctgt

SEQ ID NO: 122382 - DNA, 120 bp, synthetic construct
  source 1..120: mol_type = other DNA
ctctgcaggtggatatttggaccactctttggccttcgttcaaaacgggtacatcttcaaataaaatctagacagaagccttctcagaaacttctctgtgacgattgcattcaactcaaa

SEQ ID NO: 122383 - DNA, 120 bp, synthetic construct
  source 1..120: mol_type = other DNA
tctttggccttcgttcgaaaagggtacatcttcaaataaaatctagacagaagccttctcagaaacttctctgtgacgattgcattcaactcaaagcgttgaaccctcctatggatagag

SEQ ID NO: 122384 - DNA, 120 bp, synthetic construct
  source 1..120: mol_type = other DNA
ggataaaccgcacagaactaaacagaagcattctcagaaccttcttcgtggcgtttgcattcaacacacagtgttgaacctttctttgatagttcaggtttgaaacactctttttgtaga

SEQ ID NO: 122385 - DNA, 120 bp, synthetic construct
  source 1..120: mol_type = other DNA
tgttgtagaatcggctagtggagatttggagcgctttgaggcctatggtagtaaagggaagagcttcacatacaatctagacagaagcattttcagaaaatactttgtgatgattgagtt

SEQ ID NO: 122386 - DNA, 120 bp, synthetic construct
  source 1..120: mol_type = other DNA
tttgaggcctgtggtggaaaaggaattatcttcccgtaagaactagatagatgcattctcagaaactactttgtgacgattgcattcaagtcacagaggtgaacattccctttcagagag

SEQ ID NO: 122387 - DNA, 120 bp, synthetic construct
  source 1..120: mol_type = other DNA
gacctctttgaaggtttcgttggaaacggaatcatcttcacataaaaattacacagaagcatcctcaggaactccttggtgatgtttgtattcaacttccagagttgaactttccttcgg

SEQ ID NO: 122388 - DNA, 120 bp, synthetic construct
  source 1..120: mol_type = other DNA
attcaactcacagagttgaaggttccttttcaaacagcagtttccaaacactctttctgtggcatctgcaagtggatgtttgggcctctttgaagatttcgttggaaacgggatactctt

SEQ ID NO: 122389 - DNA, 120 bp, synthetic construct
  source 1..120: mol_type = other DNA
atggagtagtttcaaaacacactttctgtagaatctgcaagtggatatttggacctgtatgaggaattcgttgcaaacaggataatttcagctaagtaaacagaagcagtctcagaatct

SEQ ID NO: 122390 - DNA, 120 bp, synthetic construct
  source 1..120: mol_type = other DNA
tttcatagagcagatgagaaacatgcttttcgtagggtctgcaagtggacatttggagagatttcaggcctgtggtggaaaacgaattatcgtcacgtaaaaactagagagaagcattgt

SEQ ID NO: 122391 - DNA, 120 bp, synthetic construct
  source 1..120: mol_type = other DNA
tcgaaacacactttctgtagaatctgcaagtggatatttggacctgtctgaggaattcgttgcaaacgggataatttcagctaagtaaacagaagcagtctcagaatcttcttgtgatgg

SEQ ID NO: 122392 - DNA, 120 bp, synthetic construct
  source 1..120: mol_type = other DNA
tgacgactgagtttaactcacagggctgaacattcctttggacggagctgtttggaaacacactatctgtaggatctgcaagcagatacttgggcctccctgaggatttcgttggaaacg

SEQ ID NO: 122393 - DNA, 120 bp, synthetic construct
  source 1..120: mol_type = other DNA
tagttagaagccttctcagaaactactttgtgatgatcgcattcacctcacggagtggagcattcctattgacagagcagtttggaaacactcttcttgtagaatcggctagtggagatt

SEQ ID NO: 122394 - DNA, 120 bp, synthetic construct
  source 1..120: mol_type = other DNA
tttgaagatgtctttggaaacgggaatatcttcacataaaaactaaacagaagcattctcagaaacttctctgtgatgtttgtgttcaactcccagagtttcatgttgcttttcatagag

SEQ ID NO: 122395 - DNA, 120 bp, synthetic construct
  source 1..120: mol_type = other DNA
gggaaacgggataaaccgcacagaactaaacagaagcattctcagaaccttcttcgtgatgtttgcattcaacccacagtgttgaacctttctttgatagttcaggtttgaaacactctt

SEQ ID NO: 122396 - DNA, 120 bp, synthetic construct
  source 1..120: mol_type = other DNA
gggaagagcttcacataaaatcaagacagaagcattctcagaaaatactttgtgatgattgagtttaacacacagagctgaacattactttggatggagcaggtttgaaacacactttct

SEQ ID NO: 122397 - DNA, 120 bp, synthetic construct
  source 1..120: mol_type = other DNA
aaaatcttgacagaagcattctcagaaaatactttgtgatgattgagtttaacacacagagctgaacattcctttggatggagaaggtttgaaacacactttctatagaatctgcgagtg

SEQ ID NO: 122398 - DNA, 120 bp, synthetic construct
  source 1..120: mol_type = other DNA
accgctttgaggcctacggtagtaaaggaaacagcttcatataaaaactagacagcagcattctcagaaaactctttgtgacgactgagtttaactcacagggctgaacattcctttgga

SEQ ID NO: 122399 - DNA, 120 bp, synthetic construct
  source 1..120: mol_type = other DNA
tggtgatgtttgtattcaacttccagagttgaactttccttcggaaagagcagctatgaaacactctttttctagaatctgcaagtggacattgggagagctgtgaggtttgtggtgtaa

SEQ ID NO: 122400 - DNA, 120 bp, synthetic construct
  source 1..120: mol_type = other DNA
gcaagtggatgtttgggcctctttgaagatttcgttggaaacgggataatcttcacagaaaagctaaacagaagcattctcagaaacttctttgtgatgtttgctttcaactcacagagt

SEQ ID NO: 122401 - DNA, 120 bp, synthetic construct
  source 1..120: mol_type = other DNA
tgtttgcattcaaatcccagaattgaaccttcctttgaaagttcaggttggaaacactctttttgcaggatctacaagtggatattcggaccactctgtggacttcgttcgaaacgggta

SEQ ID NO: 122402 - DNA, 120 bp, synthetic construct
  source 1..120: mol_type = other DNA
gcctccctgaggatttcgttggaaatgggataaaccgcacagaactaaacagaagcattctcagaaccttcttcgtgacgtttgcattcaacgcacagtgttgaacctttctttgatagt

SEQ ID NO: 122403 - DNA, 120 bp, synthetic construct
  source 1..120: mol_type = other DNA
acatttctttgatagttcaggtttgaaacactctttctgtagaaactgcaagtggataactgcacttctttgaggcctatcgtagtaaaggaaataacttcctataaaaacaagacagaa

SEQ ID NO: 122404 - DNA, 120 bp, synthetic construct
  source 1..120: mol_type = other DNA
gaaactactttgtgatgattgcattcacctcacggattggagcattcctattgacagagcagtttggaaacactcttctcgtagaatcggctagtggagatttggagcgctttgaggcct

SEQ ID NO: 122405 - DNA, 120 bp, synthetic construct
  source 1..120: mol_type = other DNA
tctttgtgatgtttgctttcaactcacagagttgaactttccttttgagagagaagctttgaaacactctttttctagaatctgcaagtggatatttggagggctttgaggcctgtggtg

SEQ ID NO: 122406 - DNA, 120 bp, synthetic construct
  source 1..120: mol_type = other DNA
cagaaaacttctctgtgatgattgcattcaactgaaggcgttgaaccctcctatggatagggcagttttgaatctctctttttgtggaatctgcaagtggatatgtggtcctctttgaag

SEQ ID NO: 122407 - DNA, 120 bp, synthetic construct
  source 1..120: mol_type = other DNA
ctctttggccttcgttcgaaacgggtacatattcaaataaaatctagacagaagccttctcagaaacttctctgtgacgattgcattcaactcaaagcgttgaaccctcctatggataga

SEQ ID NO: 122408 - DNA, 120 bp, synthetic construct
  source 1..120: mol_type = other DNA
cagaaccttcttcgtgacgtttgcattcaacccacagtgttgaacctttctttgatagttcaggtttgaaacactctttttgtagaaactgcaagtggataactgcacttctttgaggcc

SEQ ID NO: 122409 - DNA, 120 bp, synthetic construct
  source 1..120: mol_type = other DNA
cactatctgtaggatctgcaagcggatacttgggcctccctgaggatttcgttggaaacgggataaaccgcacagaactaaacagaagcattctcagaaccttcttcgtgatgtttgcat

SEQ ID NO: 122410 - DNA, 120 bp, synthetic construct
  source 1..120: mol_type = other DNA
aaaaggaattatcttcccgtaagaactagatagatgcattctcagaaactactttgtgacgattgcattcaagtcacagaggtgaacattccctttcacagagcactttggaaactctcg

SEQ ID NO: 122411 - DNA, 120 bp, synthetic construct
  source 1..120: mol_type = other DNA
agggctgtgaggtttgtggtggaaaaggaaatatctccacataaatactagatagaagccttctcagaaactactttgtgatgattgcattcacctcacggagttgagcattcctattga

SEQ ID NO: 122412 - DNA, 120 bp, synthetic construct
  source 1..120: mol_type = other DNA
ataaaaactagacagcagcattctcagaaaactctttgtgacgactgagtttaactcaaagggctgaacattcctttcgatggagcagtttggaaacacactatctctaggatctgcaag

SEQ ID NO: 122413 - DNA, 120 bp, synthetic construct
  source 1..120: mol_type = other DNA
actagatagaagccttctcagaaactactttgtgatgattgcattcacctcacagagtggagcattcctattgacagagcagtttggaaacactcttcttgtagaatctcctagtggagg

SEQ ID NO: 122414 - DNA, 120 bp, synthetic construct
  source 1..120: mol_type = other DNA
ggagagctttcaggcctgtggtggaaaacgaattatcgtcacgtaaaaactagagagaagcattgtcagaaacttgtttgtgatgactgcattcaactcacagagttgaaggttcctttt

SEQ ID NO: 122415 - DNA, 120 bp, synthetic construct
  source 1..120: mol_type = other DNA
gcagtttggaaacactcttgttgtagaatctgctagtggagatttggagcgctttgaggcctatggtagtaaagggaagagcttcacataaaatcaagacagaagcattctcagaaacta

SEQ ID NO: 122416 - DNA, 120 bp, synthetic construct
  source 1..120: mol_type = other DNA
ctagaatctgcaagtggatatttggagggctttgaggcctgaggtggaaaaggaattatcttcccgtaagaactagatagatgcattctcagaaactactttgtgacgattgcattcaag

SEQ ID NO: 122417 - DNA, 120 bp, synthetic construct
  source 1..120: mol_type = other DNA
tgagagcgcagttttgaaactctctttctctggaatctgcaaggggacatgcagacctctttgaaggtttcgttggaaacggaatcatcttcacataaaaattacacagaagcattctca

SEQ ID NO: 122418 - DNA, 120 bp, synthetic construct
  source 1..120: mol_type = other DNA
catagagcagatgagaaacatgcttttcgtagggtctgcaagtggacatttggagagcttacaggcctgtggtggaaaacgaattatcgtcacgtaaaaactagagagaagcattgtcag

SEQ ID NO: 122419 - DNA, 120 bp, synthetic construct
  source 1..120: mol_type = other DNA
cagatcagtttggaaacactcttcttgtagaatcggctagtggagatttggagcgctttgaggcctatggtggtaaagggaagagcttcacataaaatctagacagaagcattctcagaa

SEQ ID NO: 122420 - DNA, 120 bp, synthetic construct
  source 1..120: mol_type = other DNA
ccttttgagagagaagctttgaaacactctttttctagaatctgcaagtggatatttggagggctttgaggcctgaggtggaacaggaattatcttcccgtaagaactagatagatgcat

SEQ ID NO: 122421 - DNA, 120 bp, synthetic construct
  source 1..120: mol_type = other DNA
atcctcaggaactccttggtgatgtttgtattcaacttccagagttgaactttccttcggaaagagcagctataaaacacactttttctagaatctgcaagtggacattgggagggctgt

SEQ ID NO: 122422 - DNA, 120 bp, synthetic construct
  source 1..120: mol_type = other DNA
cggaagcattctcacaaaattctttgtgatgtttgctttcaaatcccagagttgaaccttcctttgatagttcagctttgaaacactctttttgtaggatctgctggtggatatttggac

SEQ ID NO: 122423 - DNA, 120 bp, synthetic construct
  source 1..120: mol_type = other DNA
acttgggcctctctgaggatttcgttggaaacggaataaaccgcacagaactaaacagaagcattctcagaaccttcttcgtgatgtttgcattcaacccacagtgttgaacctttcttt

SEQ ID NO: 122424 - DNA, 120 bp, synthetic construct
  source 1..120: mol_type = other DNA
ggtctgcaagtggacatttcaagagatttccggcctgcggtggaaaacgaattatcgtcacgtaaaaactagagagaagcattgtcagaaacttgtttgtgatgactgcattcaactcac

SEQ ID NO: 122425 - DNA, 120 bp, synthetic construct
  source 1..120: mol_type = other DNA
cagagcagtactttctttgggatggagtagtttcgaaacacactttctgtacaatctgcaagtggatatttggacctgtctgaggaattcgttgcaaacgggataatttcagctaagtaa

SEQ ID NO: 122426 - DNA, 120 bp, synthetic construct
  source 1..120: mol_type = other DNA
gacagaagccttctcagaaacttctctgtgacgattgcattcaactcaaagcgttgaaacctcctatggatcgagcagttttgaatctctctttttgtggaatctgcaagtggatatgtg

SEQ ID NO: 122427 - DNA, 120 bp, synthetic construct
  source 1..120: mol_type = other DNA
acacactatctgtaggatctgcaagcggatatttgggcctccctgaggatttcgttggaaacgggataaaccgcaccgaactaaacagaagcattctcagaaccttcttcgtgatgtttg

SEQ ID NO: 122428 - DNA, 120 bp, synthetic construct
  source 1..120: mol_type = other DNA
tcaaataaaatttagacagaagccttctccgaaacttctctgtgacgattgcattcaactccaagcgttgaaccctcctatggatagagcagttttgaatctctcttttcgtggaatcgg

SEQ ID NO: 122429 - DNA, 120 bp, synthetic construct
  source 1..120: mol_type = other DNA
ctaccctgaggatttcgttggaaacgggataaaccgcacagaactaaacagaagcattctcagaaccttcttcgtgacgtttgcattcaacccacagtgttgaacctttctttgatagtt

SEQ ID NO: 122430 - DNA, 120 bp, synthetic construct
  source 1..120: mol_type = other DNA
cagaattgaaccttcctttgaaagttcaggttggaaacactctttttgcaggatctacaagtggatattcggaccactctgtggacttcgttcgaaacgggtatatcttcacataacatc

SEQ ID NO: 122431 - DNA, 120 bp, synthetic construct
  source 1..120: mol_type = other DNA
ctgcaagcggatacttgggcctaccctgaggatttcgttggaaacgggataaaccgcacagaactaaacagaagcattctcagaaccttcttcgtgacgtttgcattcaacccacagtgt

SEQ ID NO: 122432 - DNA, 120 bp, synthetic construct
  source 1..120: mol_type = other DNA
agaagccttctcagaaactactttgtgatgattgcattcacctcacggagtggagcattcctattgacagagcagtttggaaacactcttgttgtagaatctgctagtggagatttggag

SEQ ID NO: 122433 - DNA, 120 bp, synthetic construct
  source 1..120: mol_type = other DNA
cctcaggaactccttggtgatgtttgtattcaacttccagagttgaactttccttcggaaagagcagctatgaaacacactttttctagaatctgcaagtggacattgggaaggctgtga

SEQ ID NO: 122434 - DNA, 120 bp, synthetic construct
  source 1..120: mol_type = other DNA
aacactctttctgtggcatctgcaagtggatgtttgggcctctttgaagatttcgttggaaacgggataatcttcacagaaaagctaaacagaagcattctcagaaacttctttgtgatg

SEQ ID NO: 122435 - DNA, 120 bp, synthetic construct
  source 1..120: mol_type = other DNA
cgggtatatcttcacataacatctagacagaagcattctcagaaacttttctgtgatgactgcattcaactcacagagttgaacactccttttgagagcgcagttttgcaactctccttc

SEQ ID NO: 122436 - DNA, 120 bp, synthetic construct
  source 1..120: mol_type = other DNA
gaattatcgtcacgtaaaaactagagagaagcattgtcagaaacttgtttgtgatgactgcattcaactcacagagttggaggttccttttcaaacagcagtttccaaacactctttctg

SEQ ID NO: 122437 - DNA, 120 bp, synthetic construct
  source 1..120: mol_type = other DNA
acataaatactagatagaagccttctcagaaactactttgtgatgattggattcacctcacggagtggagcattcctattgacagagcagtttggaaacactcttgttgtagaatctgct

SEQ ID NO: 122438 - DNA, 120 bp, synthetic construct
  source 1..120: mol_type = other DNA
aactttccttttgagagagaagctttgaaacactctttttctagaatctgcaagtggatatttggagggctttgaggcctgaggtggaaaaggaattatcttcccgtaagaactagatag

SEQ ID NO: 122439 - DNA, 120 bp, synthetic construct
  source 1..120: mol_type = other DNA
gtctcagaatcttcttgtgatgtttgcattcaaatcccagaatggaaccttcctttgaaagttcaggttggaaacactctttttgcaggatctacaagtggatattcggaccactctgtg

SEQ ID NO: 122440 - DNA, 120 bp, synthetic construct
  source 1..120: mol_type = other DNA
ttcggaaagagcagctatgaaacaccctttttctagaatctgcaagtggacattgggagggctgtgaggtttgtggtggaaaaggaaatatctccacataaatactagatagaagccttc

SEQ ID NO: 122441 - DNA, 120 bp, synthetic construct
  source 1..120: mol_type = other DNA
cgaataatcgtcaagtaaaaactagagggaagcattgtcagaaacttgtttgtgatgactgcattcaactcacagagttgaaggttccttttcaaacagcagtttccaaacactctttct

SEQ ID NO: 122442 - DNA, 120 bp, synthetic construct
  source 1..120: mol_type = other DNA
gaggaattcgttgcaaacgggataatttcagctaagtaaacagaagcagtctcagaatcttcttgtgatgtttgcattcaaatcccagaattgaaccttcctttgaaagttcaggtttga

SEQ ID NO: 122443 - DNA, 120 bp, synthetic construct
  source 1..120: mol_type = other DNA
accgcacagaactaaacagaagcattctcagaaccttcttcgtgatgtttgcattcaacccacagtgttgaacctttctttgatagttcaggtttgaaacactgtttttatagaaactgc

SEQ ID NO: 122444 - DNA, 120 bp, synthetic construct
  source 1..120: mol_type = other DNA
ggcatctgcaagtggatgtttgggcctctttgaagatttcgttggaaacgggatactcttcacagaaaagctaaacagaagcattctcagaaacttctttgtgatgtttgctttcaactc

SEQ ID NO: 122445 - DNA, 120 bp, synthetic construct
  source 1..120: mol_type = other DNA
aataaaatctagacagaagccttctcagaaacttctctgtgacgattgaattcaactcacagcgttgaaccctcctatggatagagcagttttgaatctctctttttgtggaatctgcaa

SEQ ID NO: 122446 - DNA, 120 bp, synthetic construct
  source 1..120: mol_type = other DNA
accttcctttgaaagttcaggttggaaacactctttatgcaggatctacaagtggatattcggaccactctgtggacttcgttcgaaacgggtatatcttcacataacatctagacagga

SEQ ID NO: 122447 - DNA, 120 bp, synthetic construct
  source 1..120: mol_type = other DNA
cattcaacccacagtgttgaacctttctttgatagttcaggtttgaaacactcttttcgtagaaactgcaagtggataactgcacttctttgaggcctatcgtagtaaaggaaataactt

SEQ ID NO: 122448 - DNA, 120 bp, synthetic construct
  source 1..120: mol_type = other DNA
gagcttcacataaaatctagacacaagcattctcagaaaatactttgtgatgattgagtttaacacacagagctgaacattcctttggatggagaagttttgaaacacactttctgtaga

SEQ ID NO: 122449 - DNA, 120 bp, synthetic construct
  source 1..120: mol_type = other DNA
ctttcagagagcactttggaaactctcgttgtgtagaatctgcaagtggagatatggaccgctttgaggcctatggtagtaaaggaaacagcttcatataaaaactagacagcaagcatt

SEQ ID NO: 122450 - DNA, 120 bp, synthetic construct
  source 1..120: mol_type = other DNA
gtttgtgatgactgcattcaacccacagagttgaaggttccttttcaagcagcagtttccaaacattctttctgtggcatctgcaagtggatgtttgggcctctttgaagatttcgttgg

SEQ ID NO: 122451 - DNA, 120 bp, synthetic construct
  source 1..120: mol_type = other DNA
tgcattcaaatcccagagttgaaccttcctttgatagttcagctttgaaacactctttttgtagggtctgcaggtggatatttggaccactctttggccttcgttcgaaacgggtacatc

SEQ ID NO: 122452 - DNA, 120 bp, synthetic construct
  source 1..120: mol_type = other DNA
agatagaagccttctcagaaactactttgtgatgattgcattcacctcacggagtggagcattcctattgacagagcagtttggaaacactcttcttgtagaatcggctagtggagattt

SEQ ID NO: 122453 - DNA, 120 bp, synthetic construct
  source 1..120: mol_type = other DNA
ggaaacgggataatcttcacagaaaagctaaacagaagcattctcagaaacttccttgtgatgtttgctttcaactcacagagttgaactttccttttgagagagaagctttgaaacact

SEQ ID NO: 122454 - DNA, 120 bp, synthetic construct
  source 1..120: mol_type = other DNA
ctagagagaaagcattgtcagaaacttgtttgtgatgactgcattcaactcacagagttgaaggttccttttcaaacagcagtttccaaacactctttctgtggcatctgcaagtggatg

SEQ ID NO: 122455 - DNA, 120 bp, synthetic construct
  source 1..120: mol_type = other DNA
ctcgacagaagccttctcagaaacttctctgtgatgattgcattcaactcaatgcgttgaaccctcctatggatagggcagttttgaatctctctttttgtggaatctgcaagtggatat

SEQ ID NO: 122456 - DNA, 120 bp, synthetic construct
  source 1..120: mol_type = other DNA
ggataaaccgcacagaactaaacagaagcattctcagaaccttcttcgtgatgtttgcattcaacccacagtgttgaacctttctttgatagttcaggtttgaaacactctttttgtaga

SEQ ID NO: 122457 - DNA, 120 bp, synthetic construct
  source 1..120: mol_type = other DNA
ataactgcacctaactaaacggaagcattctcacaaaattctttgtgatgtttgcattcaaatcccagagttgaaccttcctttgatagttcagctttgaaacactctttttgtaggatc

SEQ ID NO: 122458 - DNA, 120 bp, synthetic construct
  source 1..120: mol_type = other DNA
gtgaggtttgtggtggaaaaggaaatatctccacataaatactagatagaagccttctcagaaactactttgtgatgattgcattcacctcacggagtggagcatccctattgatagagc

SEQ ID NO: 122459 - DNA, 120 bp, synthetic construct
  source 1..120: mol_type = other DNA
tcagaaacttctctgtgatgtttgtgttcaactcacagagtttcacgttgcttttcatagagcagatgagaaacatgcttttcgtagggtctgcaagtggacatttggagagatttcagg

SEQ ID NO: 122460 - DNA, 120 bp, synthetic construct
  source 1..120: mol_type = other DNA
cctttctttgatagttcaggtttgaaacactctttctgtagaaactgcaagtggataactgcacttctttgaggcctatcgtagtaaaggaaataacttcctataaaaacaaggacagaa

SEQ ID NO: 122461 - DNA, 120 bp, synthetic construct
  source 1..120: mol_type = other DNA
tgacagagcagtttggaaacactcttgttgtagaatctgctagtggagatttggagcgctttgaggcctatggtagtaaagggaagagcttcacataaaatctagacagaagcattctca

SEQ ID NO: 122462 - DNA, 120 bp, synthetic construct
  source 1..120: mol_type = other DNA
gcaagtggatatttggagggctttgaggcctgtggtggaaaaggaattatcttcccgtaggaactagatagatgcattctcagaaaatactttgtgacgattgcattcaagtcacagagg

SEQ ID NO: 122463 - DNA, 120 bp, synthetic construct
  source 1..120: mol_type = other DNA
gaggcctatcgtagtaaaggaaataacttcctataaaaacaagacagaagctttctcagaaaattctctgagatgattgagttgaactcacagagcagtactttccttgggatggagtag

SEQ ID NO: 122464 - DNA, 120 bp, synthetic construct
  source 1..120: mol_type = other DNA
aagggctgaacattcctttcgatggagcagtttggaaacacactatctctaggatctgcaagcggatacttgggcctctctgaggatttcgttggaaacgggataaaccgcacagaacta

SEQ ID NO: 122465 - DNA, 120 bp, synthetic construct
  source 1..120: mol_type = other DNA
gcagctatgaaacaccctttttctagaatctgcaagtggacattgggagggctgtgaggtttgtggtggaaaaggaaatatctccacataaatactagatagaagccttctcagaaacta

SEQ ID NO: 122466 - DNA, 120 bp, synthetic construct
  source 1..120: mol_type = other DNA
tttcctttcagagagcactttggaaaccctcgttgtgtagaatctgcaagtggagatatggaccgctttgaggcctatggtagtaaaggaaacagcttcatataaaaactagacagcagc

SEQ ID NO: 122467 - DNA, 120 bp, synthetic construct
  source 1..120: mol_type = other DNA
gaggtttgtggtggaaaaggaaatatctccacataaatactagttagaagccttctcagaaactactttgtgatgatcgcattcacctcacggagtggagcattcctattgacagagcag

SEQ ID NO: 122468 - DNA, 120 bp, synthetic construct
  source 1..120: mol_type = other DNA
taatcccaaccacctttattctaggcataccatactcactgccatgcttacccttcagttgggcacctgtgtcctccttcccattggccttctggttcctacccaagtgtccagtccaca

SEQ ID NO: 122469 - DNA, 120 bp, synthetic construct
  source 1..120: mol_type = other DNA
ttcaaacatgcagaaagatgaaagaatactacagaatccagtcaaagatcaggcactgcatgtcatgtcttcatttcctttaatctaaaacatgcctctactttttttgatctttcatga

SEQ ID NO: 122470 - DNA, 120 bp, synthetic construct
  source 1..120: mol_type = other DNA
ccatcctaaaccttaaaggaaaaaaagaaaatgtttaaaatcaaaagttgggggcaggaaaagaataacaaaacctttgggctcatgcctgtaatcccagcactttgggaggccaaggag

SEQ ID NO: 122471 - DNA, 120 bp, synthetic construct
  source 1..120: mol_type = other DNA
gatctgccccaccttcccccccatactgctcccctcaaccaggacagagaacatggcctcctctagggccctgcctcccaagccttaccctcacacaccaagtaccttttcagcttttta

SEQ ID NO: 122472 - DNA, 120 bp, synthetic construct
  source 1..120: mol_type = other DNA
ggaagttctggccagggcaattaggcaagagaaggaaataaagggtatccaattaggaaaagaggaagtcaaattgtccctgtttgcagatgacatgattctatatctagaaaaccccat

SEQ ID NO: 122473 - DNA, 120 bp, synthetic construct
  source 1..120: mol_type = other DNA
gatttaaacgttagacctaaaaccataaaaaccctagaagaaaacctaggcatgaccattcaggacataggcatgggcaaggacttcatgtccaaaacaccaaaagcaatggcaacaaaa

SEQ ID NO: 122474 - DNA, 120 bp, synthetic construct
  source 1..120: mol_type = other DNA
gattgcgcaaaggatataaccatgaaattctgatggagtgaccccacagctgcagaaaaccagaaagaaccctactctaaaacccaaaagacttccctagatagagtccttcgaaaataa

SEQ ID NO: 122475 - DNA, 120 bp, synthetic construct
  source 1..120: mol_type = other DNA
catctaataactcttcagaagattttgtctctgggcagtggcattttataacttcctatatggaagaaaacttttatccaactgataactgatatgccaatgtgttagtatgaaaaaatt

SEQ ID NO: 122476 - DNA, 120 bp, synthetic construct
  source 1..120: mol_type = other DNA
gcctgggtgacagagtaagactccgtctcaaaaaaaaaaaaaaaagtataaatgaagcacaattaacatttgttaattttataaagcaaaagttcataaaaataaatattctaattaact

SEQ ID NO: 122477 - DNA, 120 bp, synthetic construct
  source 1..120: mol_type = other DNA
aagtgctgggattacaggcgtgagccaccgcgcccggccgagcttggcatttttatctacctcattctaccgatgaggaggccgagtctcagagagttcacagacctgcctaaggtcact

SEQ ID NO: 122478 - DNA, 120 bp, synthetic construct
  source 1..120: mol_type = other DNA
ctaggagaaagaagccactcacaatacaccaaatgattccatttatatgaaatgtgacaaatagggatggagacagaatgaagattagtgattgccaggagctgggcaagtagggtaatg

SEQ ID NO: 122479 - DNA, 120 bp, synthetic construct
  source 1..120: mol_type = other DNA
aacagatttttgaagcagaataaagatttctgaaagagatcccacttaggcagccacgcgatgttcccaaagcaacccggtgagaaaaggagactcttttcaacaaatggtgacaaacaa

SEQ ID NO: 122480 - DNA, 120 bp, synthetic construct
  source 1..120: mol_type = other DNA
ttgaacccgggaggcagaggttgcagtaggccaagattgagccactgcactccagcctgggcaagagtaaaactttgtctcaaaaaaaaaaaaaaaaaaaaaaaaaaaggattctgacaa

SEQ ID NO: 122481 - DNA, 120 bp, synthetic construct
  source 1..120: mol_type = other DNA
ctgtctcaaaaaaaagaaaaaaaaaaaaaaagtataaggtaggatgtagagaaactggagcatatattgatagtgggaatgtaaatggtgcagccacttttggaaaacagtttggcaatt

SEQ ID NO: 122482 - DNA, 120 bp, synthetic construct
  source 1..120: mol_type = other DNA
atttttgtatttttagtagagacggagtttcagcacgttggccaggatggtctcagtctcttgacctcatgatccacccgcctcggcctcccaaagtgttgggattacaggtgtaagcca

SEQ ID NO: 122483 - DNA, 120 bp, synthetic construct
  source 1..120: mol_type = other DNA
aactcccgggctcaagcactggcaatcctcccacctcagcctcctgagtagctgagattataggagtataccattgtgcctggcacctgcttcttaattaaagattgggggccaggcacg

SEQ ID NO: 122484 - DNA, 120 bp, synthetic construct
  source 1..120: mol_type = other DNA
tggtggctcatgcctgtaatcccaggactttgggaggtcaagatgggcagatcacctgaggtcaggagtctgagaccagcctgtccaacatggtgaaactccattactactaaacataca

SEQ ID NO: 122485 - DNA, 120 bp, synthetic construct
  source 1..120: mol_type = other DNA
gtaaggccaggcctcatccagaacttctggccaaccagcttcaagtcagtgttcccatgacccccttcttaggtttgattaatttgctaaagctgtgcccagaactcaggaaaacacgtg

SEQ ID NO: 122486 - DNA, 120 bp, synthetic construct
  source 1..120: mol_type = other DNA
tatcatagcaccctccccaaccttttttttttttttttttttttttgtttgagacagggtctcactgcattgcgtaggcttgtcttgaactcctgggctcaagcaatccttgtgccttgg

SEQ ID NO: 122487 - DNA, 120 bp, synthetic construct
  source 1..120: mol_type = other DNA
tgacaggtcccatattttcaaatggatttcacatttatataacatagtgatggttctatcctattaggctatctaaaaagtctaaaaagaatgagcatgtgccaaatataaatctggttc

SEQ ID NO: 122488 - DNA, 120 bp, synthetic construct
  source 1..120: mol_type = other DNA
tcaggagtttgaggttgcagtaagctgcgattctgtcactgcactctggcctgggtgacagagcaagaccctgtcttttttttttttccctcttttttgagatggagtctcgctctgttg

SEQ ID NO: 122489 - DNA, 120 bp, synthetic construct
  source 1..120: mol_type = other DNA
caccccagcctgggcagcagagcgagactccatctctaaataaataaataaaaattaattaattaatacaaataaaaacccacaaaaatgagccaggtgtggtggcgtacacctgaagtc

SEQ ID NO: 122490 - DNA, 120 bp, synthetic construct
  source 1..120: mol_type = other DNA
attgcagtgagccaagatcacgccactgcactccagcctgcgtgacagagtaagactccgtctcaaaaataaaaaaaaaaaaccttgcaaagtaaacccaaaggaagcagaagttaataa

SEQ ID NO: 122491 - DNA, 120 bp, synthetic construct
  source 1..120: mol_type = other DNA
aggatcacttgagcccagcagtttgaggctgcagtgagatatgatggcaccactgcactccaacctgggcaacagagactctgcctctaaaaataaataaatgaaataattttttttaaa

SEQ ID NO: 122492 - DNA, 120 bp, synthetic construct
  source 1..120: mol_type = other DNA
cacttggttaggcacctaacctgaactggaggttaaaaagaagataaaacgttccctctatagtcagcaataagccaactaaattcctaaaacagcagtcactaaagcaatccatatcac

SEQ ID NO: 122493 - DNA, 120 bp, synthetic construct
  source 1..120: mol_type = other DNA
ggctgaggcacaagaatcgcttcaacccaggagacggaggctgtagtgagccgagatagtgccactgcactccagcctgggcaataagagtgagactctatctcaaataataataataat

SEQ ID NO: 122494 - DNA, 120 bp, synthetic construct
  source 1..120: mol_type = other DNA
actccagcctgggcaacaagagtgaaactctgtctcaaaaaaaaaaaacaaaaaaacatatatatatatatatctggtataactgttactatatctaaagaaagggatgagaaacaaacc

SEQ ID NO: 122495 - DNA, 120 bp, synthetic construct
  source 1..120: mol_type = other DNA
cttgaacttctgacgtcatgatccacccaccacagcctcccaaagtactgggattacaggcgtgagccactgcacccagcactgaatatatattatgtatctaaaataatttaatgtttt

SEQ ID NO: 122496 - DNA, 120 bp, synthetic construct
  source 1..120: mol_type = other DNA
caaaatataaaatgtaagttaaaagatcaaatgtgtaaattattttattttatttatttttttatttttttttttgagacggagtctcgctctgtcgcccaggctggagtgcggtggcgc

SEQ ID NO: 122497 - DNA, 120 bp, synthetic construct
  source 1..120: mol_type = other DNA
gcgagactctctcaaaaaaaaaaaagtaaaaagcaatccagctccaatactgatgtacttgtaagagtttatgccaaacttggtatctatttaaaaatcagctcatacgggaataagatt

SEQ ID NO: 122498 - DNA, 120 bp, synthetic construct
  source 1..120: mol_type = other DNA
aatatgatttccctagtaccacaaaataagttaatcttggaagtggaattttaattgtgacatttgcccgggtgtggtggctcacatctgtaatcccagcactttgggaggcatgcagat

SEQ ID NO: 122499 - DNA, 120 bp, synthetic construct
  source 1..120: mol_type = other DNA
aggattacttgaggtcaaaaattcaagaccagcttgggcaacacagtgagacaaaaaaaaattttaaattaggagggtgctggtacccacctatagtcctaactacaggagaggctgaag

SEQ ID NO: 122500 - DNA, 120 bp, synthetic construct
  source 1..120: mol_type = other DNA
aataactcttaccaccgagtgtggtggctcacacctgtaatcctagcacttttggagggtcaggcaggcagatcacttgaggccaggaattcaagaccagcctggctgacatagagagta

SEQ ID NO: 122501 - DNA, 120 bp, synthetic construct
  source 1..120: mol_type = other DNA
cttgaacccaggtagtggaggttgcagtgagctagattgagccattgcactccagcctgggcaacaagagcaaaactttgtctcaaaaattaaaaaaaaaaatttttgtactgatagtcc

SEQ ID NO: 122502 - DNA, 120 bp, synthetic construct
  source 1..120: mol_type = other DNA
gaccgcctcggcctcccaaagtgctgggattacaggcatgagccaccgcacctggcctgatcttccaattttttttttaaaagctacaaattcagatttcatgtgcagtctctctatttt

SEQ ID NO: 122503 - DNA, 120 bp, synthetic construct
  source 1..120: mol_type = other DNA
ggaggttgcagtgagccgaaatcgcgccattgcactccaacctgggcgacaaaagcaagactccatcttaaaaaaaaaaaaaatcagaaacacaaagaaatgaagcacttactggggtat

SEQ ID NO: 122504 - DNA, 120 bp, synthetic construct
  source 1..120: mol_type = other DNA
ctccagtgtgacaattccaaatgccagtctgaagcctgagtcaatttgcctaataaaactgatttcaccattaaaatagcaataattgttgccttggtggaacagttctataatagctaa

SEQ ID NO: 122505 - DNA, 120 bp, synthetic construct
  source 1..120: mol_type = other DNA
acaagagggaagaaattgcacaacaggcagcaacaaggcacaataagcagcaagaagaatctgagagtaaggaaaacaaaacaattttaaagaacagacacaggctagccgggtgcggtg

SEQ ID NO: 122506 - DNA, 120 bp, synthetic construct
  source 1..120: mol_type = other DNA
ggctgacaaccaggtctaggaaaaatttttggtcttccattgtaaatgaatttacttcctagggaatttatgtggctgtgtgatgagaggttgcaagcccagttataggtactggagttc

SEQ ID NO: 122507 - DNA, 120 bp, synthetic construct
  source 1..120: mol_type = other DNA
aaataaacatgccacgaaatcttaagaagaaggaaattgcttcttttacagacttcagaatggcccaggtcttaatagatgagcccagtgctcggttccctgcttggttgatgtggggtt

SEQ ID NO: 122508 - DNA, 120 bp, synthetic construct
  source 1..120: mol_type = other DNA
tggccgggtgcaggtgacccttttcgtttaccttttggccaattaagtagaattttgttttgactaatggttgcttgtgacacactcattatctcactaaagagctcttgttttatctct

SEQ ID NO: 122509 - DNA, 120 bp, synthetic construct
  source 1..120: mol_type = other DNA
ccacagccgtgcacgacgaggggcagcaggtgatggggcggcagcagccttcctgcagggagcaggggtcgcagcacaccgggcggcggcagggctcgcagatggggcgcgtgcagcggg

SEQ ID NO: 122510 - DNA, 120 bp, synthetic construct
  source 1..120: mol_type = other DNA
taaatgaatggggtagtttatcaggaaagatattactgaggaggaaatatttaactgggttttgacaaatgagtaggagtttgcagagtggacaaaaaaagacgacacattccaagaaga

SEQ ID NO: 122511 - DNA, 120 bp, synthetic construct
  source 1..120: mol_type = other DNA
ttagaaataaagtgtcagagtcatgtgaccagtgctttgtaaaagacactgcagagaccagggacaaaggtgacccccactaaggaagaaatatgacaagtgtttccaatagaaacacag

SEQ ID NO: 122512 - DNA, 120 bp, synthetic construct
  source 1..120: mol_type = other DNA
tggggttgatgtcattcaataggatggaccttatgcttccaaagagcccaccaccatttcactgactctgtgagaacattctggttcattttaaactccctcctttgctttctttttctt

SEQ ID NO: 122513 - DNA, 120 bp, synthetic construct
  source 1..120: mol_type = other DNA
gtgggagcaggaggtggttctgcagcaggtggtctgacaacagctggggtgacagcagttgggtgggctggcagcacacagactggaagcactggggctgcatggcatctttgaactgca

SEQ ID NO: 122514 - DNA, 120 bp, synthetic construct
  source 1..120: mol_type = other DNA
agaagcatacacggaatcagagtcatcttcattatagatgggacatccttctcccgaatgagtccttccttctaattcctttccaacatttcatctgaccaggacattatttgacaacaa

SEQ ID NO: 122515 - DNA, 120 bp, synthetic construct
  source 1..120: mol_type = other DNA
tccagctgctgcaggccccagtgctgccagcctgcgtgctgccaacccacttgctgtcgccccagctgctgtgagacgacctgctgccaccctaggtgctgcatctccagctgctgtcgc

SEQ ID NO: 122516 - DNA, 120 bp, synthetic construct
  source 1..120: mol_type = other DNA
gtgtgtccagctgctgccagccttgctgccgcccaacttgctgtcaaaacacctgctgccagcccatctgtgtgaccagctgctgccagccttcctgctgcagcacaccctgctgtcagc

SEQ ID NO: 122517 - DNA, 120 bp, synthetic construct
  source 1..120: mol_type = other DNA
taatctctcatatttgcaaataatatttttattcacaaaaaaatcccaaattattttttcccacacctcagtgagcaacagctgcatgacatggcagcagggattgcatttaatggctgc

SEQ ID NO: 122518 - DNA, 120 bp, synthetic construct
  source 1..120: mol_type = other DNA
ccttcttgctgctgatcacgttccaagagaaccaccatcctcacacaacaaatttctgctcaactgactcatcttttgggggactaatttaatttgctgctgacagccaccatgctctca

SEQ ID NO: 122519 - DNA, 120 bp, synthetic construct
  source 1..120: mol_type = other DNA
gcctccatctcctgaacacctattgacgaagtaaatgaaactaagttattccttgtaaaacacagactgtaccttatgccacattaagaaaatttgtcccataattgagacgttatgagg

SEQ ID NO: 122520 - DNA, 120 bp, synthetic construct
  source 1..120: mol_type = other DNA
cctacattatctcagctacaacataatcaggatattcacgtggactactgagtctttcggtgcccccttgctgttttagttttgtcctgcggccgagtgtttccctcgcttcacgccaac

SEQ ID NO: 122521 - DNA, 120 bp, synthetic construct
  source 1..120: mol_type = other DNA
tgacttcaagtaatccacccaccttggcctcccaaagtgctgagattacaggcatgagctaccacccccggcctacagttcatcttgtgccctaatctatatttcactctctacatgagc

SEQ ID NO: 122522 - DNA, 120 bp, synthetic construct
  source 1..120: mol_type = other DNA
ctgaactttggactctttttgaccttgggtgttctgtgggtcatgcggagcgagttttgtgaaagcggtatttttttctggaatgtgaaattggtttagaagccttcatatttgtaactc

SEQ ID NO: 122523 - DNA, 120 bp, synthetic construct
  source 1..120: mol_type = other DNA
tgctcctcgggttgctgcaagactttggttacatttctagagttctgaaaaagtttattatggtcaatttttttttttgcccttttcttggtgtttgttgcttttatgaagggatgaatt

SEQ ID NO: 122524 - DNA, 120 bp, synthetic construct
  source 1..120: mol_type = other DNA
aggcggaggttgcagtgagccgtgatcgtgccactgctctccagcctgggcaacggaacaagactccatctcaaaaaaaaaaaaaaaaaaaaaaaaagaaaagaaaagcaaccaatataa

SEQ ID NO: 122525 - DNA, 120 bp, synthetic construct
  source 1..120: mol_type = other DNA
tctcataccggtgcaacttcttccaatacctcaaaactggacaacgtgaacttatcttgttgcttgtctcttcttgctagggctgtcattgggacagtccgagatgggggggtgggggga

SEQ ID NO: 122526 - DNA, 120 bp, synthetic construct
  source 1..120: mol_type = other DNA
agaaagcatatcaggcagcctcagggtgaggaagggagcccagcctctccagcagccacacaggcctgcaataggatggggctggggctggtttggggtggaggataagtgacagccaag

SEQ ID NO: 122527 - DNA, 120 bp, synthetic construct
  source 1..120: mol_type = other DNA
aatgtgtttgtttgtttgtttgtgtgtttgtttgtttgttttttgagatggagtttcactcttgttgcccaggctggagtacaatggcgaaatctcggctctctgcagcttccgccttct

SEQ ID NO: 122528 - DNA, 120 bp, synthetic construct
  source 1..120: mol_type = other DNA
tggagagatggaatgctccatggagctccaggcttactgtctgcagcccccaaagtgtgctccgggacccttgggtgggtgtaggtatgcaaggtaatttggggtggttcaaggtgaaga

SEQ ID NO: 122529 - DNA, 120 bp, synthetic construct
  source 1..120: mol_type = other DNA
gttttataaagagcagtctccttgtagaccagctcctgaaagcagtgcgagagagggattcctgtgtcctttgcacggtggggaacctgacgctgccacagagctggaattgaaaccccg

SEQ ID NO: 122530 - DNA, 120 bp, synthetic construct
  source 1..120: mol_type = other DNA
tggatcacgagtgatcctgtagtaagtgagggttttgttcacgtggttcagagtgttacggagagcttttgttctaagcttatttgcctggagaaaggaaaaaatgatcttattagcacc

SEQ ID NO: 122531 - DNA, 120 bp, synthetic construct
  source 1..120: mol_type = other DNA
ctcagcgtgaaccaggtagtggaagggaaggggaagggcagagtgagaaccaggaggaatgcttgcttttctttccaagcacaagggaccactttctccactgcagctgacctgatgctt

SEQ ID NO: 122532 - DNA, 120 bp, synthetic construct
  source 1..120: mol_type = other DNA
gagtattgccaccactccttcctcctgtgccagcgactctgagctccgtgtctgactcagtctgatgcccgccaccccggcctaggtttggaggtcaggcagcccggggtttcaattcca

SEQ ID NO: 122533 - DNA, 120 bp, synthetic construct
  source 1..120: mol_type = other DNA
catagtaacctccagctgagaatgcttcttataaaatgccagcctggaaattctccaggggtttcccccgatcagcaggtaggtaacgctggaaggcatcccgggtgtgggacagactgg

SEQ ID NO: 122534 - DNA, 120 bp, synthetic construct
  source 1..120: mol_type = other DNA
tttcggaaaaccgcattttttttttcttctgggctggagcacagggctgtagggaggcagctgtggcatctgtggggcgcagccggtaaccccagaacattattcaaagatgcaccgcaa

SEQ ID NO: 122535 - DNA, 120 bp, synthetic construct
  source 1..120: mol_type = other DNA
acctcctgctgtgtagcctggttcctaacagctggggatccctcatttacccagcaagataaatacattattatgtcaattgaaattcttcaccttgaaccaccccaaattaccttgcat

SEQ ID NO: 122536 - DNA, 120 bp, synthetic construct
  source 1..120: mol_type = other DNA
agaatagtgggtcagttttctccaggatccagaaagcatatcaggcagcctcagggtgaggaagggagcccagcctctccagcagccacacaggcctgcaataggatggggctggggctg

SEQ ID NO: 122537 - DNA, 120 bp, synthetic construct
  source 1..120: mol_type = other DNA
ttacaatcatggcagaaggggaaggggaagcaggcaccttcttcacaagacggcaggagggagtgagtggagaaccagtaagtgccacactttgaaactatcagctctcctgagaactac

SEQ ID NO: 122538 - DNA, 120 bp, synthetic construct
  source 1..120: mol_type = other DNA
tgtggcaataatcaatagtttaccaaccaaaaagagtccaggaccagatggattcacagccgaattctagcagaggtacaaggaggaactggtaccattccttctgaaactattccaatc

SEQ ID NO: 122539 - DNA, 120 bp, synthetic construct
  source 1..120: mol_type = other DNA
agaataaaatacctaggaatccaacttacaagggatgtgaaggacctcttcaaggagaactacaaaccactgctcaaggaaataaaagaggagacaaacaaatggaagaacattccatgc

SEQ ID NO: 122540 - DNA, 120 bp, synthetic construct
  source 1..120: mol_type = other DNA
ggggtggttccgcagccttctttcatttcatcttcactttgtccctttctgtacaacctgcagtgtttgcgttgttataacattatcaaaagctttatggatctcccatttatatctgga

SEQ ID NO: 122541 - DNA, 120 bp, synthetic construct
  source 1..120: mol_type = other DNA
ttgcccacgcctatgtcctgaatggtaatgcctaggttttcttctagggtttttatggttttaggtctaacatttaaatctttaatccatcttgaattgatttttgtataaggtgtaagg

SEQ ID NO: 122542 - DNA, 120 bp, synthetic construct
  source 1..120: mol_type = other DNA
aaatgtaaagaccatcaagactaggaagaaactgcatcaactaatgagcaaaatcaccagctaacatcataatgacaggatcaaattcacacataacaatattaactttaaatataaatg

SEQ ID NO: 122543 - DNA, 120 bp, synthetic construct
  source 1..120: mol_type = other DNA
agcctacagaggcaggcaggcctcctggagctgtggtgggctccacccagttcgagcttccctgctgctttgtttacctaagcaagcctgggcaatggcgggcgcccctcccccagcctc

SEQ ID NO: 122544 - DNA, 120 bp, synthetic construct
  source 1..120: mol_type = other DNA
gatggacgtggtggaggggagggatgcggtggagaggatggacacagtggaggggagggaagtggtggagaggagggacgtggtggaggggagggatgtggtggagaggatggacatggt

SEQ ID NO: 122545 - DNA, 120 bp, synthetic construct
  source 1..120: mol_type = other DNA
cctcatgtgtgcagttcctgagtgagcactggtggtggggaacaggcctggctttccatgcctggggggtgcaggggggatgggcctggctttccacgcctgggggatgcaggggggatg

SEQ ID NO: 122546 - DNA, 120 bp, synthetic construct
  source 1..120: mol_type = other DNA
caactacatggaaactgaacaacctgctcctgaatgactactgggtacataacaaaatgaagccagaaataaagatgttctttgaaaccaaggagaacaaagacacaacataccagaatc

SEQ ID NO: 122547 - DNA, 120 bp, synthetic construct
  source 1..120: mol_type = other DNA
caatcaatagaaaaagagggaatcctccctaactcattttatgaggccagcatgattctgataccaaagcctggcagagacacaaccaaaaaagagaattttagaccaatatccttgatg

SEQ ID NO: 122548 - DNA, 120 bp, synthetic construct
  source 1..120: mol_type = other DNA
cctcctcggacctcggccagacctccgggccctcctcggacctcggccagacctccgggccctcctcggacctcggccagacctccggacccctcctcggacctcggccagacctccgga

SEQ ID NO: 122549 - DNA, 120 bp, synthetic construct
  source 1..120: mol_type = other DNA
acataacaatattaactttaaatataaatggactaaattctgcagttaaaagacacagactggcaagttggataaagagtaaagacccatcagtgtgctgtattcaggaaacccatctca

SEQ ID NO: 122550 - DNA, 120 bp, synthetic construct
  source 1..120: mol_type = other DNA
ttttattgtgtctatttgattcttctctctttttttctttattagtcttgctagcggtctatcaattttgttgatcctttcaaaaaaccagctcctggattcattgattttttgaagggt

SEQ ID NO: 122551 - DNA, 120 bp, synthetic construct
  source 1..120: mol_type = other DNA
ccataaaaaatgatgagttcatgtcctttgtagggacgtggatgaaattggaaaccatcattctcagtaaactatcgcaagaacaaaaaaccaaacaccgcatattctcactcataggtg

SEQ ID NO: 122552 - DNA, 120 bp, synthetic construct
  source 1..120: mol_type = other DNA
tgcaggatattatccaggagaacttccccaatctagcaaggcaggccaacgttcagattcaggaaatacagagaacgccacaaagatactccttgagaagagcaactccaagacacataa

SEQ ID NO: 122553 - DNA, 120 bp, synthetic construct
  source 1..120: mol_type = other DNA
tactggatcacaccctagaacctcaacaccaaaagtaccttgctaacatactcccatctgaaaccaaagacaagaagtcagcttcaaatcaagacccgaataaagtgtcagttctgtgaa

SEQ ID NO: 122554 - DNA, 120 bp, synthetic construct
  source 1..120: mol_type = other DNA
gaatgcatctgtaggaggtagctggagagacctcggttgacaggtcccgctgagtgaggagaagcctcactcagaaaagtattggggccacttttcttttttccttttttttttgagaga

SEQ ID NO: 122555 - DNA, 120 bp, synthetic construct
  source 1..120: mol_type = other DNA
tgttttccacctgacagagatctgaaacctccccaggatgaacctccaagaaggagaggcaggccgccatctttgctgttggggcaacttagccattgcatcctgcaggctttagagggt

SEQ ID NO: 122556 - DNA, 120 bp, synthetic construct
  source 1..120: mol_type = other DNA
cccctttaaaaagcagtctggcctcgtttttgtagaccagctgcgctgtgctaagggtccgcgcttcagcccccagtcacctagaacactccaaagcccacaagctggaatggctaagcc

SEQ ID NO: 122557 - DNA, 120 bp, synthetic construct
  source 1..120: mol_type = other DNA
tgtaacagtgtggccactttctgtagggctgctgcagtatgctgagggcctgctccagtccctagtcaccttggatttttcagcacctggaggtatgaaggttgcaaaacagcaaagatg

SEQ ID NO: 122558 - DNA, 120 bp, synthetic construct
  source 1..120: mol_type = other DNA
agttaccagagttctcgcgttggttctttctcatctctgcatgtgggtgttcctttaacttcagtgcagactcagtacagtcaatagacttcttttctggatgttttcacagaactgaca

SEQ ID NO: 122559 - DNA, 120 bp, synthetic construct
  source 1..120: mol_type = other DNA
gagtgtatgtgtcgaggaatgtatccatttcttctagattttgtagtttatttgcgtagaggtgtttgtagtattctctgatggtagtttgtatttctgtgggatcggtggtgatatccc

SEQ ID NO: 122560 - DNA, 120 bp, synthetic construct
  source 1..120: mol_type = other DNA
atgattttgcagcggctggtaccggttgttcctttccatgtttagcgcttccttcaggagctcttttagggcaggcctggtggtgacaaaatctctcagcatttgcttgtctataaagta

SEQ ID NO: 122561 - DNA, 120 bp, synthetic construct
  source 1..120: mol_type = other DNA
tgaagcaggaggattgcttgagcatatgagttcaaagttgcagtgagctgtgattgtgccactgcactctagcctgggtgacagagggaggtcttgtctcaaaaaaaaaaaaaagaacaa

SEQ ID NO: 122562 - DNA, 120 bp, synthetic construct
  source 1..120: mol_type = other DNA
agacagcagcattctcgggagattctttgtgatgtttgcttttaagtcacagagttgaatattcccttcaatagagcagatttgaaacactctttctgtagtatctgaaagtggacactt

SEQ ID NO: 122563 - DNA, 120 bp, synthetic construct
  source 1..120: mol_type = other DNA
actgctttgtgacgtatgtcttcaactaacagagttgaacatttctattcacagagcagttttgaaagactcttttggagtatctgctagtggatatttggagagtttaaggatttcatt

SEQ ID NO: 122564 - DNA, 120 bp, synthetic construct
  source 1..120: mol_type = other DNA
acaaagcagacagcagcattctcagaagcttctttatgatgtttgcgttcaagtcacagagttgaacgttccctttcatagagcaggtttcaaaccctctttctgcagtatctggaagtg

SEQ ID NO: 122565 - DNA, 120 bp, synthetic construct
  source 1..120: mol_type = other DNA
tttttgggatatatgtactcaactaacagggttgaacctttctctttatagatcagttttggaaagctctttatgtggaatctgcagatggatattcggatagctctgaggatttcattg

SEQ ID NO: 122566 - DNA, 120 bp, synthetic construct
  source 1..120: mol_type = other DNA
tatctggatgtgggcacttggagctcttggacgcttatggtgaaaaaggaaatatcgtcccataaaacctagacagaagcattctcacaaactgctttgtgacgtatgtcttcaactaac

SEQ ID NO: 122567 - DNA, 120 bp, synthetic construct
  source 1..120: mol_type = other DNA
caggaggatatttggatagctttgagtgttacgttggaaacgggattacatgtacaaagcagacagcagcattctcagaagcttctttatgatgtttgcgtttaagtcacagagttgaac

SEQ ID NO: 122568 - DNA, 120 bp, synthetic construct
  source 1..120: mol_type = other DNA
cttcctaaagcaggtttgaaacactctttttgtcgtatctggaagtggacatttggagcactttgacgcctttggtgaaaaaggaaatgtcttcccatcaaaactagacagaagcattct

SEQ ID NO: 122569 - DNA, 120 bp, synthetic construct
  source 1..120: mol_type = other DNA
agttcaacctttcttatgatacagcagttgggaaacaccctttttatagaatttgcaagctgatacatggatagccctaactatttcgttggaaacgggaatatcttcacataaaaccta

SEQ ID NO: 122570 - DNA, 120 bp, synthetic construct
  source 1..120: mol_type = other DNA
ctcaactaacagtgtacaacctatcttttgatacagcacgttggaaacactctttttatagaatctgcaagtggatatttggatagctctaacgatttcgttggaaacgggaatcccttc

SEQ ID NO: 122571 - DNA, 120 bp, synthetic construct
  source 1..120: mol_type = other DNA
gctagtggatatgtggagagctttaaggatttcactggaaaccggaatatcttcaggtaaaatctagacagaggcattctcagaaacttcttcgtaatgtgtgtcctcaactaacattgt

SEQ ID NO: 122572 - DNA, 120 bp, synthetic construct
  source 1..120: mol_type = other DNA
ggaggatatttggatagctttgaggattacgttggaaacgggattacatatacaaagtagacagcagcattctcagaagcttcgtcatgatgtttgcatttaagtcacagagttgaacgt

SEQ ID NO: 122573 - DNA, 120 bp, synthetic construct
  source 1..120: mol_type = other DNA
aactagacagaagcattctaagaaacatttttgggatgtatgtactcaactaacagagttgaacctttctctttatagatcagttttggaaagctctttatgtggaatctgcagatggat

SEQ ID NO: 122574 - DNA, 120 bp, synthetic construct
  source 1..120: mol_type = other DNA
atatacaaagtagacagcagcattctcagaagcttctttgtgatgtttgcgtttaagtcacagagttgaacgttccctttcgtagagcaggtttcaaaccctctttctgcagtatctgga

SEQ ID NO: 122575 - DNA, 120 bp, synthetic construct
  source 1..120: mol_type = other DNA
ggacatttcgagcgctttcaggcctatggtgaacaaggaaatatcttcccaagcaaactagacagaagcattcgcagaaacttgtttgtgatgtgtgtcctcaactcacagagttgaaca

SEQ ID NO: 122576 - DNA, 120 bp, synthetic construct
  source 1..120: mol_type = other DNA
tcccataaaacctagacagaagcattctcacaaactgctttgtgacgtatgtcttcaactaacagagttgaacatttctattcacagagcagttttgaaagactcttttggagtatctgc

SEQ ID NO: 122577 - DNA, 120 bp, synthetic construct
  source 1..120: mol_type = other DNA
gcctagacagaagcactctcagaaactactttgtgatatctgcattcatatcacagagttgaatattccctttctaagggcaggcttgaaagcgtcttttcgtggaatctgcaggaggat

SEQ ID NO: 122578 - DNA, 120 bp, synthetic construct
  source 1..120: mol_type = other DNA
ctgtagtatctggatgtgggcacttggagcgcttggacgcttatggtgaaaaaggacatatcgtccataaaaactggacagaagcattctcacaaactgctttgtgacgtatgtcgtcag

SEQ ID NO: 122579 - DNA, 120 bp, synthetic construct
  source 1..120: mol_type = other DNA
atacagcagtttggaaacactctttttatagaatttgcaagttgatacatggatagccctaactatttcgttggaaacgggaatatcttcatataaaacctaggcagaaacactctcaga

SEQ ID NO: 122580 - DNA, 120 bp, synthetic construct
  source 1..120: mol_type = other DNA
gttggaaacgggaataccttcatataaaatctagacagtggcactcgcagaaactgctttgtgatatctgcattcaagccacagagttgaacatttcccttcctaaagcaggtttgaaac

SEQ ID NO: 122581 - DNA, 120 bp, synthetic construct
  source 1..120: mol_type = other DNA
attcccttcaatagagcaggcttgaaacactctttctgtagtatctggaagtggacatttcgatcgatttcaggcctatgttgaaaaaggaaataccttaacataaaaactagacagaag

SEQ ID NO: 122582 - DNA, 120 bp, synthetic construct
  source 1..120: mol_type = other DNA
cattccctttcatagagcaggtttgaaacaccctttctgaagtatctggatgtgggcacttggagctcttggacgcttatggtgaaaaaggacatatcgttccattaaaaactggacaga

SEQ ID NO: 122583 - DNA, 120 bp, synthetic construct
  source 1..120: mol_type = other DNA
tggatagccctaactatttcgttggaaacgggaatatcttcatataaaacctagacagaagcattctcagaaactactttgtgatatctgcattgatttcagagagttgaatattccctt

SEQ ID NO: 122584 - DNA, 120 bp, synthetic construct
  source 1..120: mol_type = other DNA
atagaatctgcaagtggatagttggatagctctaaagatttcgttggaaacgggaataccttcaaataaaatctagacagtggcactctcagaaactgctttgtgatatctgcattcaag

SEQ ID NO: 122585 - DNA, 120 bp, synthetic construct
  source 1..120: mol_type = other DNA
gaggatatttggatagctttgagggttacgttggaaacgggattacatgtacaaagcagacagcagcattctcagaagcttctttatgatgtttgcgttcaagtcacagagttgaacgtt

SEQ ID NO: 122586 - DNA, 120 bp, synthetic construct
  source 1..120: mol_type = other DNA
ctaaagcaggtttgaaacactctttttgtcgtatctggaagtggacatttggagcactttgacgcctttggtgaaaaaggaaatgtcttcccatgaaaactagacagaagcattctaaga

SEQ ID NO: 122587 - DNA, 120 bp, synthetic construct
  source 1..120: mol_type = other DNA
aacagtctcagaaactgctttgtgatatctgcattcacgtcacagagttgaacattccctttcatagagcaggtttgaaacacactttctgtagtatctggatgtgggcacttggagcgc

SEQ ID NO: 122588 - DNA, 120 bp, synthetic construct
  source 1..120: mol_type = other DNA
ccctttcatagagcaggtttgaaacacactttctgtagtatctggatgtgggcacttggagcgcttggacgcttatggtgaaaaaggacatatcgttccataaaaactggaaagaagcat

SEQ ID NO: 122589 - DNA, 120 bp, synthetic construct
  source 1..120: mol_type = other DNA
caactaacagagttcaacctttcttatgatacagcagttgggaaacaccctttttatagaatttgcaagctgatacatggatagccctaactatttcgttggaaacgggaatatcttcac

SEQ ID NO: 122590 - DNA, 120 bp, synthetic construct
  source 1..120: mol_type = other DNA
gagcgcttggacgcttatggtgaaaaaggacatatcgtcccataaaaagtggacagaagcattctcacaaacggctttgtgacgtatgtcttcaactaacagagttgaacatttctattc

SEQ ID NO: 122591 - DNA, 120 bp, synthetic construct
  source 1..120: mol_type = other DNA
attctcagaaacgtctttgtgatgtgtgtcctcaactaacagagttcaacctttcttatgatacagcagttgggaaacactctttttatagaatttgcaagctgatacatggatagccct

SEQ ID NO: 122592 - DNA, 120 bp, synthetic construct
  source 1..120: mol_type = other DNA
tagtggatatttggagagctttaaggatttcattggaaaccggaatatcttcaggtaaaatctagacagaggcattctcagaaacttctttgtaatgtgtgtcctcaactaacagtgtac

SEQ ID NO: 122593 - DNA, 120 bp, synthetic construct
  source 1..120: mol_type = other DNA
cagagtagaacattccctttcatagagcacgtttgaaacacactttctgtagtatctggatgtggacacttggagcgcttggacgcttatggtgaaaaaggaaatatcgtcccataaaaa

SEQ ID NO: 122594 - DNA, 120 bp, synthetic construct
  source 1..120: mol_type = other DNA
gaatatcttcatataaaacctaggcagaagcactctcagaaactactttgtgatatctgcattgatatcagagagttgaatattccctttctaagggcaggcttgaaagcgtcttttcgt

SEQ ID NO: 122595 - DNA, 120 bp, synthetic construct
  source 1..120: mol_type = other DNA
aggatttcactggaaaccggaatatcttcaggtaaaatctagacagaggcattctcagaaacttctttgtaatgtgtgtcctcaactaacagtgtacaacctatcttttgatacagcacg

SEQ ID NO: 122596 - DNA, 120 bp, synthetic construct
  source 1..120: mol_type = other DNA
ttgcgttcaagtcacacagttgaacgttccctttcatagagcaggtttcaaaccctctttctgcagtatctggaagtggacatttcgagcgctttcaggcctatggtgaacaaggaaata

SEQ ID NO: 122597 - DNA, 120 bp, synthetic construct
  source 1..120: mol_type = other DNA
ttggagtatctgctagtggatatttggagagctttaaggatttcattggaaaccggaatgtcttcaggtaaaatctggacagaggcattctcagaaacttctttgtaatgtgtgtcctca

SEQ ID NO: 122598 - DNA, 120 bp, synthetic construct
  source 1..120: mol_type = other DNA
ttacatgtacaaagtagacagcagcattctcagaagcttctttatgatgtttgcgttcaagtcacacagttgaacgttccctttcatagagcaggtttcaaaccctctttctgcagtatc

SEQ ID NO: 122599 - DNA, 120 bp, synthetic construct
  source 1..120: mol_type = other DNA
ggaataccttcatataaaatctagacagtggcactctcagaaactgctttgtgatatctgcattcaagccacagagttgaacatttcccttcctaaagcaggtttgaaacactctttctg

SEQ ID NO: 122600 - DNA, 120 bp, synthetic construct
  source 1..120: mol_type = other DNA
gttacgttggaaacgggattacatgtacaaagcagacagcagcattctcagaagctgctttatgatgtttgctttcaagtcacagagttgaacgttccctttcatagagcaggtttcaaa

SEQ ID NO: 122601 - DNA, 120 bp, synthetic construct
  source 1..120: mol_type = other DNA
gggatatatgtactcaactaacagagttgaacctttctctttacagatcagttttggaaagctctttatgtggaatctgcagatggatattcggatagctctgaggatttcgttggagac

SEQ ID NO: 122602 - DNA, 120 bp, synthetic construct
  source 1..120: mol_type = other DNA
aaacaagacagaagcattctcagaaacttctttgtgatgtgtgtcctcaactaacagagttcaacctctcttataatacagcagtttgaaaaaacactttttgtagaatatgcaagtgga

SEQ ID NO: 122603 - DNA, 120 bp, synthetic construct
  source 1..120: mol_type = other DNA
atttcactggaaaccggaatatcttcaggtaaaatctagacagaggcattctcggaaacttcttcgtgatgtgcgtcctcaactaacagagtacaacctgtcttttgatacatcagtttg

SEQ ID NO: 122604 - DNA, 120 bp, synthetic construct
  source 1..120: mol_type = other DNA
tccaagaatcttccttgcgatatatgtactcaactaccagagttgaacctttctattgatagatcagttttgaaaagctctttttgtggaatctgcaattggatataaggatagttctga

SEQ ID NO: 122605 - DNA, 120 bp, synthetic construct
  source 1..120: mol_type = other DNA
cgagcgctttcaggcctatggtgaacaaggaaatatcttcccataaaaactagatagaagcattcgcagaaacttctttgtgatgtgtgtcctcaactcacagagtcgaacatttcgttt

SEQ ID NO: 122606 - DNA, 120 bp, synthetic construct
  source 1..120: mol_type = other DNA
gtagacagcagcattctcagaagcttctttgtgatgtttgcttttaaatcgcagagttcaatattcccttccatagagcaggtttgagacactctttctgtagtatctggaagtggacat

SEQ ID NO: 122607 - DNA, 120 bp, synthetic construct
  source 1..120: mol_type = other DNA
ccctcaactcacagagtggaacacttcgtttcacagagcagtttggaaacacgctttttgtagaatttgcatgtggatatttggatagctttgtggatttcgttggaaacggaagtatcc

SEQ ID NO: 122608 - DNA, 120 bp, synthetic construct
  source 1..120: mol_type = other DNA
agacagaagcattcgcagaaacttgtttgtgatatgtatcctcaactatcagagttgaacatttcatttgacagagcagtttggaaacacgctttttgtagaatctgcaagtggatattt

SEQ ID NO: 122609 - DNA, 120 bp, synthetic construct
  source 1..120: mol_type = other DNA
cattcacaattgcttcaaagagaataaaatacctaggaatccaacttacaagggatgtgaaggacctcttcaaggagaactacaaaccactgctcaaggaaataaaagaggagacaaaca

SEQ ID NO: 122610 - DNA, 120 bp, synthetic construct
  source 1..120: mol_type = other DNA
agggacaatttgacttcctcttttcctaattgaataccctttatttccttcgcctgcctgattgccctggccagaacttccaacactgtgttgaataggagtggcgagagagggcatccc

SEQ ID NO: 122611 - DNA, 120 bp, synthetic construct
  source 1..120: mol_type = other DNA
gtagaattcggctgtgaatccatctggtcctggactctttttggttggtaaactattgattattgccacaatttcaggtcctgttattggtctattcagagattcaacttcttcctggtt

SEQ ID NO: 122612 - DNA, 120 bp, synthetic construct
  source 1..120: mol_type = other DNA
aaagatcaaaagagacaaagaaggccattacataatggtaaagggatcaattcaacaagaagagctaactatcctaaatatatatgcacccaatacaggagcacccagattcataaagca

SEQ ID NO: 122613 - DNA, 120 bp, synthetic construct; identical to SEQ ID NO: 95263
  source 1..120: mol_type = other DNA

SEQ ID NO: 122614 - DNA, 120 bp, synthetic construct
  source 1..120: mol_type = other DNA
gaaaaccaaggctcgagaactacgtgaagaatgcagaagcctcaggagccgatgcaatcaactggaagaaagggtatcagcaatggaagatgaaatgaatgaaatgaagcgagaagggaa

SEQ ID NO: 122615 - DNA, 120 bp, synthetic construct
  source 1..120: mol_type = other DNA
ataaatatttaggatagttagctcctcttgttgaattgatccctttaccattatgtaatggccttctttgtctcttttgatctttgttggtttaaagtctgttttatcagagactaggat

SEQ ID NO: 122616 - DNA, 120 bp, synthetic construct
  source 1..120: mol_type = other DNA
acaggcacagtggaatgaaaattcccttgtcagtttttccaaaataattgcttcgggaaaccatctaagcaactgttggatctgccacaacttcatcaccaggtcctcatcttaccaata

SEQ ID NO: 122617 - DNA, 120 bp, synthetic construct
  source 1..120: mol_type = other DNA
cataactttggaaaaggtgattcagcagggtccatttgggaggctgtgaagtctgccctcccctccctcacatggtttgtccctttactgggaccagctgcacttaatagcctgctttct

SEQ ID NO: 122618 - DNA, 120 bp, synthetic construct
  source 1..120: mol_type = other DNA
ccaatatattttggtaagaaatttttctttaaacctaacatttggttcaggaatccctgaaggccaacataaatctgttccgctccaggtttcgcttgctaactcagcgcaccaagtccc

SEQ ID NO: 122619 - DNA, 120 bp, synthetic construct
  source 1..120: mol_type = other DNA
tttggaaaaggaggtgcttcagcaagggccatctgggaggctgtgaagtctgccctcccctccctcaactggtttgtccctttactgggaccagcaacagttatactcttacttttcctc

SEQ ID NO: 122620 - DNA, 120 bp, synthetic construct
  source 1..120: mol_type = other DNA
tcacggtgagtcgggaacacacgtacgcaatggccgaggtacactctagagcattcacagtcagttaaggacacatgcacacaatggccatggtacattttacagcatttatagtcaggt

SEQ ID NO: 122621 - DNA, 120 bp, synthetic construct
  source 1..120: mol_type = other DNA
tttgtttcacaagacacttatgtatgcatttgaatgggtaccaattccaaagtggtggagattcaaagccgaatcaaacatttgcctctacatgcacatccagcagcacagcatcctgca

SEQ ID NO: 122622 - DNA, 120 bp, synthetic construct
  source 1..120: mol_type = other DNA
ctggatcagactctacccaccacgctctaatgatctcagggtgccagctgggctcccctggatcagagcccacccaccacgctctaatgatctcagggcaccagccaggctcccctgaat

SEQ ID NO: 122623 - DNA, 120 bp, synthetic construct
  source 1..120: mol_type = other DNA
ctctaatgatctcagggcaccagctgggctcccctgaatcagagcccacccaccacgctctaatgatctcgggatgccagcctgggcttccttggatcagtccacctaccacactctaat

SEQ ID NO: 122624 - DNA, 120 bp, synthetic construct
  source 1..120: mol_type = other DNA
ggtccagaacccagaggctggagtagttcatgcctgctcctgcctcccaggtattcaagggaaacccaccatctccacacaccagcaaaacaccagcaaaacagaggccccaagtaatga

SEQ ID NO: 122625 - DNA, 120 bp, synthetic construct
  source 1..120: mol_type = other DNA
acgctgaggtggagctcagagaactgtaagaactctattcctttgtgagtgtttctagcagcagaggaaacggtgggcacgaagagggtagcttggcaaagccgttgtgccaagcagaag

SEQ ID NO: 122626 - DNA, 120 bp, synthetic construct
  source 1..120: mol_type = other DNA
taagaatgcatatcacactatgtcccaagggcttttcaagtattaattggaatttgagttgtctaggtcactactccatgacaaaatcatgactaaatagcttcacatatcccttttata

SEQ ID NO: 122627 - DNA, 120 bp, synthetic construct
  source 1..120: mol_type = other DNA
cactatcctgtctaacgcatggggttgtgtgagaattaagtgaattttcacagctaacctatgacagtaccttatactcaaccctcaataaatcagaagagttttcccccaatggttctg

SEQ ID NO: 122628 - DNA, 120 bp, synthetic construct
  source 1..120: mol_type = other DNA
tgcttttccttgacctctgtgtgtatcccagatctctactgtgatctgactttgtagcctcttccttgatcctgattgccagctactgggtacaacttagtctgctcccagcccaataaa

SEQ ID NO: 122629 - DNA, 120 bp, synthetic construct
  source 1..120: mol_type = other DNA
cttttgctgtatcccacaggttttggtatgttttgttttcatttttatttgattcaaaaaatttttaaacttccagctgggcatggtggctcatgcctgtactccccgtggtctgggagg

SEQ ID NO: 122630 - DNA, 120 bp, synthetic construct
  source 1..120: mol_type = other DNA
gcagtttaagaaatggttaattgacaaagaaacattgaacttaaataggactttacagacatttacagaacactctaccaaacaactgcagaatatacattcttctcatcagcacgtgga

SEQ ID NO: 122631 - DNA, 120 bp, synthetic construct
  source 1..120: mol_type = other DNA
cggttttgttgttataactaggctactttgtattaaccctggaattgaaacttattatgaaaataatttgcatgtaggtttactaataaagaatcaggctcaaatgcactaaaagacaga

SEQ ID NO: 122632 - DNA, 120 bp, synthetic construct
  source 1..120: mol_type = other DNA
tcaaaaaaaaaaaaaaaaaagaaataggctgttaggaagtcctgtggagaaagcaggctataacaaatgaatctaacaatattacaaacgcatgatacagcctcactgaaagagttgcat

SEQ ID NO: 122633 - DNA, 120 bp, synthetic construct
  source 1..120: mol_type = other DNA
agaatcatttgcagcacttgtttaaaatttagatgcccaaatcctgtctctgaaaatgctgacttaggtctggtgttgggtcccctgcactgtattttgaaacaagtccacaggtggttt

SEQ ID NO: 122634 - DNA, 120 bp, synthetic construct
  source 1..120: mol_type = other DNA
aaatcaatgaatccaggagctgtttttttgaaaaaattaacaaaatagatagtctgctagctagacaaataaggaagaaaagacagaataaccaaattgacacaataaaaaatgatgaag

SEQ ID NO: 122635 - DNA, 120 bp, synthetic construct
  source 1..120: mol_type = other DNA
ttagatctgtggcatctttttgtcaaattccctgtattcaagggagtggtaagagagggcattcttgccttgtggtggtttgtaaagggaatgcttccagcttttgcccatttagtataa

SEQ ID NO: 122636 - DNA, 120 bp, synthetic construct
  source 1..120: mol_type = other DNA
aaatatctgctgattaattgtcagacattggttggcttttgggatactgacaacacagtgtcttgtcagctaagaatcagatcctggatggtgggggtttcatcaaagccattctaccat

SEQ ID NO: 122637 - DNA, 120 bp, synthetic construct
  source 1..120: mol_type = other DNA
gtagctgggactacaggtgcatgctaccacacctggctaattttttgtatttttagtagagatggggtttcgttgtgttgctcatgctggttttgaactcctggactcaagccatctgcc

SEQ ID NO: 122638 - DNA, 120 bp, synthetic construct
  source 1..120: mol_type = other DNA
agccatcacgcctggccagaatgtcactaatttttattgcaagggtaaatggcttctgagatctaaaattttaccaggcagcgtgactggttcatcagagtgaaggctttacttttaact

SEQ ID NO: 122639 - DNA, 120 bp, synthetic construct
  source 1..120: mol_type = other DNA
gcactggaagaggaatgccctggtagtgggtgtcttcccagcacactgcacacagtgactcagggcttgctgaattttttattaagctgtatatctcctttctttttttttttttttttt

SEQ ID NO: 122640 - DNA, 120 bp, synthetic construct
  source 1..120: mol_type = other DNA
gggctttccctggctgctggaaaacttaggccagtaagcatctctttgtttaaagtcctacaagacaatttgaaataattcattgttcatgccaaaattctaagtactgtttttcttagc

SEQ ID NO: 122641 - DNA, 120 bp, synthetic construct; identical to SEQ ID NO: 21192
  source 1..120: mol_type = other DNA

SEQ ID NO: 122642 - DNA, 120 bp, synthetic construct
  source 1..120: mol_type = other DNA
cattttatatcaggaacttgagcgtctgagattttggtatcctcacagcatcctagaaatagtatcctgcacatattgagcaacaactgtatacataaaggttgagggccgggtgtggtg

SEQ ID NO: 122643 - DNA, 120 bp, synthetic construct
  source 1..120: mol_type = other DNA
tttcctggattgttttcacaaactgcacatgaacagtttcaaaagtatttcctgaattaggtgatgtctgcaggcagccatgaatcatgctgaaaacagtatcgttcaaaactttgccag

SEQ ID NO: 122644 - DNA, 120 bp, synthetic construct
  source 1..120: mol_type = other DNA
acatttccatggtcatagaatgattgcccacagattgcttctttcttacagaggagggaaggaaattgtaattcacagtgatgttatcagccagcaccatgcctgggagatcaccagtgc

SEQ ID NO: 122645 - DNA, 120 bp, synthetic construct
  source 1..120: mol_type = other DNA
taaagccttcttgaagcaggaagtgccatggtctgtatccagcagcagctcctcctttataggtgctactgagatgctcacctctattctctttttgggctattataataggctgtgtct

SEQ ID NO: 122646 - DNA, 120 bp, synthetic construct
  source 1..120: mol_type = other DNA
ataccacaaactgggtaatttgtaaccaacagaagtttatttggctcatggttctggaggctgggaagtccaagatcaaggggctggcatctggtgaggaccttcttctgcatcattaca

SEQ ID NO: 122647 - DNA, 120 bp, synthetic construct
  source 1..120: mol_type = other DNA
ctttactatagttaatgtgaacttacttggtaaattatagtagggatggagaagaaacagtaggccaaatgctaagaaaacagtttgggccaggtgcagtggcacacgcctgtaatccca

SEQ ID NO: 122648 - DNA, 120 bp, synthetic construct
  source 1..120: mol_type = other DNA
agaataagggcattttcctatggaaccatgatacattttgtaaattttttttttccttgagacagggtctcgctctattgcccaggctgaagtgcagtgggcaatcatagctcactgcag

SEQ ID NO: 122649 - DNA, 120 bp, synthetic construct
  source 1..120: mol_type = other DNA
ggatgccagctgttattcatggctttgataactcggccaatgatgaattcacctgtgggaaagcaacacacaaaggatgttactaagtaacatcctaagtaacaggcatggcactttatt

SEQ ID NO: 122650 - DNA, 120 bp, synthetic construct; identical to SEQ ID NO: 66799
  source 1..120: mol_type = other DNA

SEQ ID NO: 122651 - DNA, 120 bp, synthetic construct; identical to SEQ ID NO: 66798
  source 1..120: mol_type = other DNA

SEQ ID NO: 122652 - DNA, 120 bp, synthetic construct
  source 1..120: mol_type = other DNA
ttaactggcaaagtcagttcttactgttgaaccaaccaaagcagattttctcctagaaagataacttttttttttcccagtcccgctctgttgcccagtctggagtgcagtggtacaatc

SEQ ID NO: 122653 - DNA, 120 bp, synthetic construct
  source 1..120: mol_type = other DNA
atctaactgtccatcagcggatgaatggattaaaaaaatacggtacatatacccagcagagtactctttggccgtaaaaaagaatgagatcctgtcatctgtggcgacatggatgaacct

SEQ ID NO: 122654 - DNA, 120 bp, synthetic construct
  source 1..120: mol_type = other DNA
tcttttaacaagacaagtaggagtcaagaacactgaccatggatccagactgcctgtgttcaaaatctggctgaaagactcattgtgtggtcttgggcaagttgcttaacctctagggcc

SEQ ID NO: 122655 - DNA, 120 bp, synthetic construct
  source 1..120: mol_type = other DNA
aattttgttattttttgtagagacaggatctcactatgttgtccaggctgctcttgaactcctggcttcaagcaatcctcccacctgagtctctcaaagtgctaggattacaggtgtgct

SEQ ID NO: 122656 - DNA, 120 bp, synthetic construct
  source 1..120: mol_type = other DNA
gccagataacatttctgtcaacaatggaccatatatactaccatggtatatggtatatttactgtactttttctgcttggatacttttagatacacaatactcaccattgtgttacaact

SEQ ID NO: 122657 - DNA, 120 bp, synthetic construct
  source 1..120: mol_type = other DNA
aggaaggcagaaactgaaatggaagacccttccaaccagcacatctgtttatctgtggatccactcacttcaaggcagtttatgacaaaccagtataaagtaccaaatgaagatttgcaa

SEQ ID NO: 122658 - DNA, 120 bp, synthetic construct
  source 1..120: mol_type = other DNA
aaaaaaaagagaaactgtagttgagacagaaatactggtgctcatttcttcagatatatgttctggtaagtggttaggaaacaaggatctcattctatacttgcctctgtggccaaaggg

SEQ ID NO: 122659 - DNA, 120 bp, synthetic construct; identical to SEQ ID NO: 21184
  source 1..120: mol_type = other DNA

SEQ ID NO: 122660 - DNA, 120 bp, synthetic construct; identical to SEQ ID NO: 21115
  source 1..120: mol_type = other DNA

SEQ ID NO: 122661 - DNA, 120 bp, synthetic construct
  source 1..120: mol_type = other DNA
gacaccctcacagaccctgcatttgtattgctcagttcatcgtcctatttcagaacccagagtcccttatgacagagcctttcagacctaagcagctcagctccacatagaaaattcttt

SEQ ID NO: 122662 - DNA, 120 bp, synthetic construct
  source 1..120: mol_type = other DNA
attatgtaaaattctgtgattttaagatacattttataatattggtaatcaggttcgtcttaccgattaggtaacaggactggggcatcttggctggttttaaggctacttaagcagttg

SEQ ID NO: 122663 - DNA, 120 bp, synthetic construct
  source 1..120: mol_type = other DNA
ttggtaataacttcatgaagtacattgattaaatatctggaaggtcagaagctgtaccagggaactagacacacaggtgtagagctcatgctgtgggtaggcctgtgaaaataaacttgc

SEQ ID NO: 122664 - DNA, 120 bp, synthetic construct
  source 1..120: mol_type = other DNA
tgcattcaacctattacagtctattgttttagatgaaatatatgaagaaaacatggcctcccacagagatgtagttggaaaagaggacttttctgcctcctgaaagggtcatggtgacgc

SEQ ID NO: 122665 - DNA, 120 bp, synthetic construct
  source 1..120: mol_type = other DNA
agttaatgagaatttaactgacccggttctctacttccataatccgtgctctgtggtacagatgtcacttatcttcacaactcacagagagctctgtttgacagtaactggggaattgta

SEQ ID NO: 122666 - DNA, 120 bp, synthetic construct
  source 1..120: mol_type = other DNA
aacgaagaaatcccccgagcagcccttaacactgtccacgaggccaatgggaccgaggacgagagggctgtttccaaactgcagcgcaggcacagtgacgtgaaagtctacaaggagttc

SEQ ID NO: 122667 - DNA, 120 bp, synthetic construct
  source 1..120: mol_type = other DNA
cacactcctgtctcctgtgattgagttagcaatgcgaaaggaaactaaatcactaagccaaggaaaaagtcaagctggaaactacgtcaggcaaacttgcctcctgttttattgctaaat

SEQ ID NO: 122668 - DNA, 120 bp, synthetic construct
  source 1..120: mol_type = other DNA
gtttaaatcttgactccaccacctccttagtagttattcagtctctttgtgcctcagtttcttcatttgtaactaacacctatctcagaagccgtgggaaggattaagggatgtgatagg

SEQ ID NO: 122669 - DNA, 120 bp, synthetic construct
  source 1..120: mol_type = other DNA
agcaaactggacatgtggagcaacttggattgatctcagggcattgtgctgaatgaaaagccttaagatgtcacatgaacgattccatttggtaacattctttaaataacagaatcatat

SEQ ID NO: 122670 - DNA, 120 bp, synthetic construct
  source 1..120: mol_type = other DNA
ttatgagaatcaactggttgggtcatcagttcctagggagaggctaatgggaaggtgatctatagagtgtgatagaagacaatctagctttcttgctgcatcttttcttcgttcagaaca

SEQ ID NO: 122671 - DNA, 120 bp, synthetic construct
  source 1..120: mol_type = other DNA
agacaatcgcaaaaacaagttgtgacctttttgtgttccttaagcccagtcacgaaggcacttgtgactgggtctcatgccaaacaacttgttacaaaaacagctagagtcccagactgc

SEQ ID NO: 122672 - DNA, 120 bp, synthetic construct
  source 1..120: mol_type = other DNA
ggattacaggcatgagccaccacgcctggccttgcagaagctttttaacttaatgtgatcccatttgtgcatttttgctttggttgcctgtgcttgtggggtattattcaataaattttt

SEQ ID NO: 122673 - DNA, 120 bp, synthetic construct
  source 1..120: mol_type = other DNA
tctaactaatgtttttgtacccattaaccattcctttcccattccccatctcaccactacacttcgcagcctctggtaaccatccttctactctctgtgtccatgagttaaattgttttg

SEQ ID NO: 122674 - DNA, 120 bp, synthetic construct
  source 1..120: mol_type = other DNA
tagtttactatgaactgatgatatactggcaaacttactagatggagggctttgagccagctacttacacatcatgtcctaatctatgaaatagcccacgctgcagttgtagggatgagg

SEQ ID NO: 122675 - DNA, 120 bp, synthetic construct
  source 1..120: mol_type = other DNA
gttgagtctcaaagtggtctgtgaataaaaaaaaaaggtcaaattaagatgttttgaccaagcacagtggctcacatctgtaatctcagcacttttggaggctgaggcaggcagatcacc

SEQ ID NO: 122676 - DNA, 120 bp, synthetic construct
  source 1..120: mol_type = other DNA
aactgaattccattgatctgttctgtaaatcattttacatttatgttaatcttccaaaaagtgtgctcccattttcctcacctcttatttttaaaatgttgtcatcatatataacaccag

SEQ ID NO: 122677 - DNA, 120 bp, synthetic construct
  source 1..120: mol_type = other DNA
gtataataaatagatagatatgttgtagataatgaaagttggggtctcactctcagagaaaaaagttacaaataagcaaggggggaagttagaatgagccttgtggagtagagtgggagg

SEQ ID NO: 122678 - DNA, 120 bp, synthetic construct
  source 1..120: mol_type = other DNA
agcacgtggaatattctccaacacaaacctctatcaagccacaaaacaaatttttcttttttttttttttttgagacaaagtctcgctcttgcctcccaggctggagtgcaatggcgcga

SEQ ID NO: 122679 - DNA, 120 bp, synthetic construct
  source 1..120: mol_type = other DNA
atacagataaaaaaattcaaaggatcaatgaaatgaaaagtttgtttttcaaaaagaaaaacagattgataagccactagctagactaaccaagaaaagagaaaatctgaataaacaaaa

SEQ ID NO: 122680 - DNA, 120 bp, synthetic construct
  source 1..120: mol_type = other DNA
tgaatggggaaaagctgaaagcattctaagtactgaaacaaaacaaggttgcctactttcaccactcctattcaacatattaattagtactggaagtcctagccagagcaatcaggcaag

SEQ ID NO: 122681 - DNA, 120 bp, synthetic construct
  source 1..120: mol_type = other DNA
aagtgtatgaccttttctctgtactcttgccaacatttgttatttttgtctttttaataagtcattctgactgatgtaaaatgatatctcattgtggttttaattagcatttctctggtg

SEQ ID NO: 122682 - DNA, 120 bp, synthetic construct
  source 1..120: mol_type = other DNA
gtgttgacttggaagagtgagggggtgggaggggagttgatggtgagaaattacttaataggtaaaaatgtgtgttattcagatgatgtatacccaacaaagccctgacaaggattttga

SEQ ID NO: 122683 - DNA, 120 bp, synthetic construct
  source 1..120: mol_type = other DNA
aaaaagaatagtactccttaactaatcagggtttgaggaatgagagggtgcttcaacattacaaactcaactgaccaggattccttggacaaatggctgattcaaggactgtagcaggaa

SEQ ID NO: 122684 - DNA, 120 bp, synthetic construct
  source 1..120: mol_type = other DNA
acattttcctagccctcactcaaaatggagtcactccagttcaaacacctctgacataaggacttccttccaaagagtacagtaaggaaagggaaagaaagagggacttttctgtggaga

SEQ ID NO: 122685 - DNA, 120 bp, synthetic construct; identical to SEQ ID NO: 66769
  source 1..120: mol_type = other DNA

SEQ ID NO: 122686 - DNA, 120 bp, synthetic construct; identical to SEQ ID NO: 66768
  source 1..120: mol_type = other DNA

SEQ ID NO: 122687 - DNA, 120 bp, synthetic construct; identical to SEQ ID NO: 66767
  source 1..120: mol_type = other DNA

SEQ ID NO: 122688 - DNA, 120 bp, synthetic construct
  source 1..120: mol_type = other DNA
aagtttgaaacatgagattacttggtcaaatgatatgaagcctttatggctcttgctctgtgttatcctcttgctttttcaaagggccgtgagctaacagggagcagttcatgacgaact

SEQ ID NO: 122689 - DNA, 120 bp, synthetic construct; identical to SEQ ID NO: 66765
  source 1..120: mol_type = other DNA

SEQ ID NO: 122690 - DNA, 120 bp, synthetic construct
  source 1..120: mol_type = other DNA
aaatcagtggggccaggcacggtggctctcggctgaaatcccagcagaggccaaggcgggtgaatcacctgaggtcaggagttcaagacaagcctggccaacatggtgaaaccccatctc

SEQ ID NO: 122691 - DNA, 120 bp, synthetic construct
  source 1..120: mol_type = other DNA
tcttcatctttgttcctcctcagtcttatattgtctattttaggtttagaaacattttattggtgtctttgctgggattttgattggaattgcactgggtctatagatcaagtttggagg

SEQ ID NO: 122692 - DNA, 120 bp, synthetic construct
  source 1..120: mol_type = other DNA
tacttcctgaggacagtgacctgattccacttgtggactgtgggcttggcttaccttgtggatggctccagcccccagcagaaaacttagaagcatcagatcttagtgttgctgtggctt

SEQ ID NO: 122693 - DNA, 120 bp, synthetic construct
  source 1..120: mol_type = other DNA
ctggtttcttgaaaagctttttaagaggatctgccaaattacataagcatttctagtttttcttaattttaattctcattatgagattttctcatcaaaaataattcagatagttctaaa

SEQ ID NO: 122694 - DNA, 120 bp, synthetic construct
  source 1..120: mol_type = other DNA
tttagaaggtagaatgtgcagaacttaattagttggtgcagtgggttgaatggtgtctccctaaaagatatgttcacctggaacctcagcatgtgaccttatttggaataagggctcttg

SEQ ID NO: 122695 - DNA, 120 bp, synthetic construct
  source 1..120: mol_type = other DNA
ataagatgcagaaatcagcaataaggaggttggggagaagatccttctttagaaagaattgccagagaaggtggttgggataggcagaaaaaatagtaatattcctcttttatcttcacc

SEQ ID NO: 122696 - DNA, 120 bp, synthetic construct
  source 1..120: mol_type = other DNA
aaatatccattgagaccaaaagcagattgtggttgccccggactaaagaaagagtaattacttaattttcctgggggtttcctcttggcatgatgttctgtatacaggacatacaaaaag

SEQ ID NO: 122697 - DNA, 120 bp, synthetic construct
  source 1..120: mol_type = other DNA
aacaattccactcctaggtatctacccaagaaaaataaaaatacatgtccacacaaggggacttgtgcataatgttcatatcagccctatttgtaataacaccaaattggaaggaatcca

SEQ ID NO: 122698 - DNA, 120 bp, synthetic construct
  source 1..120: mol_type = other DNA
gtttatcacagagatggtaaaaaccttgataaaaagtcatttacccagagaagcatctggttccaacagctttgcaagtgcatcctattaaaactttattgattggcaaacgctaatttt

SEQ ID NO: 122699 - DNA, 120 bp, synthetic construct
  source 1..120: mol_type = other DNA
ctggtgtgaaatggtatctcattgtggttttgatttgcatttctctgatggccattgatgatgagcgttttttcatgtgtctgttggctgcaaaaatgtcttcttttgaaaagtgtctgt

SEQ ID NO: 122700 - DNA, 120 bp, synthetic construct
  source 1..120: mol_type = other DNA
gactggctaaaaatcaaagacttaaagtatgctgtctgcaagaatcacacctgaaagacaaagacagactgcaaatatagaaatggtcaaagatacagcattcaaaccctgaccccgggg

SEQ ID NO: 122701 - DNA, 120 bp, synthetic construct
  source 1..120: mol_type = other DNA
ctgcctcagcctcccaaagtgctgggattaaaggcatgagccaccgtgcccagcctaaaaacagaaaacattttgaactaaatgaaaataaaaacacaacacaccaaaacatacaggatg

SEQ ID NO: 122702 - DNA, 120 bp, synthetic construct
  source 1..120: mol_type = other DNA
ggagcatgtgccgtgacagacgcgaactttcaaactcactcgaaaacgaaatcccagatctgaatggttctcaacctactaaagaaactgaatttgggattcaaaaccttctgattaaga

SEQ ID NO: 122703 - DNA, 120 bp, synthetic construct
  source 1..120: mol_type = other DNA
ccagctgcagaagattaaatgatcagctggacttcataacaataaaaaccttcaactcttcactcttcaaatgaaaggcaagccacaagggagagaaatattctgtgtgtggcaggagga

SEQ ID NO: 122704 - DNA, 120 bp, synthetic construct
  source 1..120: mol_type = other DNA
aacctttttttgcacaaataaactgcagatctgaaatcagcaagaaggttcaggacctgggcccccaggattggaaccacgggagtctcagatcctcaaactagctgggtttgcttcagt

SEQ ID NO: 122705 - DNA, 120 bp, synthetic construct
  source 1..120: mol_type = other DNA
ctgagcaggccaccatgctactctttgggagtcctttttcttctttttaaatgaggcttgattggcttagggagaaacaggagacaccgcataccatgcagttaaaaatgaaactcggat

SEQ ID NO: 122706 - DNA, 120 bp, synthetic construct
  source 1..120: mol_type = other DNA
gaccggcagcttcctggagtaaccagagggctgagcctcctccttgacttgttcggagtgtttcttcactgaccggtttacctgggtgtgcatacggagggtgagccactggaacagtga

SEQ ID NO: 122707 - DNA, 120 bp, synthetic construct
  source 1..120: mol_type = other DNA
ttatgtgtattttactgcaataaaaaaatgttaagccaggtcccatagttcagcaagaaccaaaagggccacaggacctcccagtagctccctgccccgtccttagaaacctgagccccc

SEQ ID NO: 122708 - DNA, 120 bp, synthetic construct
  source 1..120: mol_type = other DNA
tctgctgagactcagaaggtgcccttacatggagccagagaacaaatcgaggccacagggggaaggcaggaagagctgcttcaaaagagaaacttcaggctcccatgagccttttaacag

SEQ ID NO: 122709 - DNA, 120 bp, synthetic construct
  source 1..120: mol_type = other DNA
tgatgcagccacattaagcatgaaacatctgtttagcatccaaatgtgccaaagaaaaagatttacactgatcagaatttgttggcatttgatgctggagctgagtgtgggggctgctct

SEQ ID NO: 122710 - DNA, 120 bp, synthetic construct
  source 1..120: mol_type = other DNA
gacagaggggctctgtgaagctctctgtggagttgcaactcgcacacgcgtgcacacattcatacactcatacacgtgcacacacatgcacaaacccccacacactcacaagcctatgtg

SEQ ID NO: 122711 - DNA, 120 bp, synthetic construct
  source 1..120: mol_type = other DNA
ccctttatacccggccataatgagagaaaaagcatttatgctgaggtgatttttgccaagaaagaaggcaaccatgggcttgtttctgtcattcctgctgcactaaccctgtcaaagtgt

SEQ ID NO: 122712 - DNA, 120 bp, synthetic construct
  source 1..120: mol_type = other DNA
aaagtggccttcacttgagttcagcaacatttattggacacggcacttatttggtccagacactggggacgtaaagaacacagcctggtgggggcacaaggtacagaaaccacgaggcca

SEQ ID NO: 122713 - DNA, 120 bp, synthetic construct
  source 1..120: mol_type = other DNA
agggcttttcctacgcataaagctctgttgtggtttttagaaaccacccccaggaagaggaatggccaagggagcagaaaggaggaaatgtcagccccaaagttgcatcttgagttggtc

SEQ ID NO: 122714 - DNA, 120 bp, synthetic construct
  source 1..120: mol_type = other DNA
tgcagacgaattttaacaagatcccaagctaaatgcaatcagggagaaatgaaaacttgggcaaaacacatcacatgttccaaggtcaaaggtgaaagctgtttgtgactgttgcacacc

SEQ ID NO: 122715 - DNA, 120 bp, synthetic construct
  source 1..120: mol_type = other DNA
tcccaaacagcacaaagtacagcccagaccagaatgttttggaaggactcagaaacaagaaagtgtgtgctgagtaagggccggggctgcaaaatacagggaagagaagccaccttgcag

SEQ ID NO: 122716 - DNA, 120 bp, synthetic construct
  source 1..120: mol_type = other DNA
aagccaactcccccttagaaaaccttagtatgcgtgtcagccaaattccttagggttgaggcagaggtgtagcgagggaagcttgccggactagagtcaagacacaggtatgtttagcat

SEQ ID NO: 122717 - DNA, 120 bp, synthetic construct
  source 1..120: mol_type = other DNA
tcactaagccaaagggcaaagtcaagctggtgtaaaccaaaaataaaattctaagtcccccgacaagaacggacccttcctctcagcaagggcattccaaagctaacctgaaaaacaagt

SEQ ID NO: 122718 - DNA, 120 bp, synthetic construct
  source 1..120: mol_type = other DNA
acctgaggtcaggagttcgagaccagcttggctaacatggtgaaaccctgtgtctactaaaaatattttaaaaattagacaggcgtggtggcacgtgcctgtaatcccagctactcggga

SEQ ID NO: 122719 - DNA, 120 bp, synthetic construct
  source 1..120: mol_type = other DNA
atgccaaagtgtagtactaagtttctggaaaacttacttccctggctgagggtggtggagggaaggacactgattcatcaagaagaggaaaatattccaagtacaatgtataaaggagca

SEQ ID NO: 122720 - DNA, 120 bp, synthetic construct
  source 1..120: mol_type = other DNA
ccacctaatttttgtatttttagtagagacagggtttcctgttgttggccaggctggtcttggactcctggcctcaaatgatccacccgcatcagcttcccaaagtgctgggatgacagg

SEQ ID NO: 122721 - DNA, 120 bp, synthetic construct
  source 1..120: mol_type = other DNA
tccaacataggcttcaaaggcctccaaatgtccacttgcagattctacaaaaagagagtttcaaagccgctcagtcaaaaaatgtttaattatgtgagataaatgcacatgtcacaaaga

SEQ ID NO: 122722 - DNA, 120 bp, synthetic construct
  source 1..120: mol_type = other DNA
acaaagcgctccaaatgtccacttgcagattctacaaaaagagcatttccaaagtgttcaatcaaaagaaaggttcaaccctgttagatgaatgcacacatgacaaggcagtttctcaga

SEQ ID NO: 122723 - DNA, 120 bp, synthetic construct
  source 1..120: mol_type = other DNA
agacatttccttttccaccacagacctcaagacactgaaaatgtccacttgcagattctacaaagagcttatttcaaaactggtccttcaaaagaaagggtcaactcggggagatgaatg

SEQ ID NO: 122724 - DNA, 120 bp, synthetic construct
  source 1..120: mol_type = other DNA
cttctctacaatagtccccaaagcgctccaaatgtccacattcagattctactaaaagtgtttttgcaactgctttataaaaataaggattcaactgtgtgagatgaaggcacacatcac

SEQ ID NO: 122725 - DNA, 120 bp, synthetic construct
  source 1..120: mol_type = other DNA
atgtcctgtgggagcagcttaaatgtgcattggtggcctttccacacaaatgcaaattgattatgattttctcctgaaataggaatcaaaaagaaagtaagtggccaagtgtggaggctc

SEQ ID NO: 122726 - DNA, 120 bp, synthetic construct
  source 1..120: mol_type = other DNA
aaagagaaagaaatataattcacacatcataaaattcacccatttaaaatgaacaactgagggtgcggtgactcatacctataaccccaatgctcttgaggccaaggcgggaggattgct

SEQ ID NO: 122727 - DNA, 120 bp, synthetic construct
  source 1..120: mol_type = other DNA
attagtgtgcaagtttttatatggacatttttcactttttttttttcttgagacagggtcttgctctgtcacctaggctggagtgcagtggcttgatcaccatccattgcagcctcaacc

SEQ ID NO: 122728 - DNA, 120 bp, synthetic construct
  source 1..120: mol_type = other DNA
ctggtttcgaactcctgacctcaggtgatccacccgcctcggcctcccaatgtgctaggattacaggtgtgagccaccatgcccagccctttccttttttttttttttttttttatagga

SEQ ID NO: 122729 - DNA, 120 bp, synthetic construct
  source 1..120: mol_type = other DNA
aaattggtggacttggcaacacaggctcttttttagttactttcatttttgccaaagcagcctaaccagccagggaactgtattcttggctgacttcctctgtgtctggatttcttttta

SEQ ID NO: 122730 - DNA, 120 bp, synthetic construct
  source 1..120: mol_type = other DNA
aggatagatacaaaaaaaaaaaaaacccaacaaaccaaaaggcaagtgaaacaccacacccagttcctagggtccttttgcagccacagaggatgtggaagatgtgcttcatctttaagc

SEQ ID NO: 122731 - DNA, 120 bp, synthetic construct
  source 1..120: mol_type = other DNA
tcaggacccaaaaggagtaatgaaacctacagagtctcacaccagaagtattttattctagtttttttgtttctgttgtttttgagacagtgtctcactctgtcgcccaggctggagtac

SEQ ID NO: 122732 - DNA, 120 bp, synthetic construct
  source 1..120: mol_type = other DNA
accagtgccatcttcctgaatctgctgtacgatactaatgtttaagttcctgtttcctgaattatgtttcctcaaaggtttttaccacttaccttggtgtttacttttcatattatcaac

SEQ ID NO: 122733 - DNA, 120 bp, synthetic construct
  source 1..120: mol_type = other DNA
agaatgtgttaaaatattctatgtgctactggtcccatttctgttctattttatttttttttacctttaaactctgttggacttgacattcttgttttcttaattttcctgggtttatac

SEQ ID NO: 122734 - DNA, 120 bp, synthetic construct
  source 1..120: mol_type = other DNA
ttcttgcctaacaagattacttccctgaactgtaaaactccctcagtactgcatacagagagaggttaggagacatggtggtcgtggataggaaatgagggaattatgataggaaagttg

SEQ ID NO: 122735 - DNA, 120 bp, synthetic construct
  source 1..120: mol_type = other DNA
tttgtcttcatgcagtttgaggtgcatcgccttcttggtatgtggttggggttaaccaaaccgaaagctctccaaacctgtggtttattttttaatggaggtgccatcacttaggcatga

SEQ ID NO: 122736 - DNA, 120 bp, synthetic construct
  source 1..120: mol_type = other DNA
ttcaagtgattctccttcctcagcctccccagcagctgggactacaggcacatgccacctcgcccagctaatttttgtattttcagtagagacagggtttcaccatgttgaccaggatgg

SEQ ID NO: 122737 - DNA, 120 bp, synthetic construct
  source 1..120: mol_type = other DNA
agctaaaaagtacacacacatagggcagtgttttaaagtttagctacttcagggcatatgtgtatactcactgaagttttaatttaatggcttattggtcattcatgtatcttctttggt

SEQ ID NO: 122738 - DNA, 120 bp, synthetic construct
  source 1..120: mol_type = other DNA
aatcagaaacaacccaatgtccattggggataaacacatggataaacaacgtatccataaatgaagtacaggtggtaaaaagaagcaaagtattgatatatgcaacaaatgaataagctc

SEQ ID NO: 122739 - DNA, 120 bp, synthetic construct
  source 1..120: mol_type = other DNA
ctctgtcacccaggctggagtgcagtggcgtgatctcggctcactgaaatttctgcctcccgggttcacgccattctcctgcctcagcctcccgagtagctgggactacaggcgcccgcc

SEQ ID NO: 122740 - DNA, 120 bp, synthetic construct
  source 1..120: mol_type = other DNA
ttcctccaaagagtcaattcttaatgcttaaaacttgaactaggctgggcacagtggctaacgtctgtaatcccagcactttgggaggcctaggagagaggatcatttgaggccaggagt

SEQ ID NO: 122741 - DNA, 120 bp, synthetic construct
  source 1..120: mol_type = other DNA
gctacgggtagaagagcatgattaaaacacaagactaggaaaaggcagacatgttcagggaataacgtacatatgtgatggggcagaatctagaatgtgtaagtgggggaacagtaaaat

SEQ ID NO: 122742 - DNA, 120 bp, synthetic construct
  source 1..120: mol_type = other DNA
gagtgattcccatttccactggctggtttatcattatcatataagctccatgtctaactcaagtgttaccacttcaaatgggttttcaccatcctagctaaaatagcagccactgtctct

SEQ ID NO: 122743 - DNA, 120 bp, synthetic construct
  source 1..120: mol_type = other DNA
ctgtccctttgattttctgtttagtaggctctccaaattatcactcattatgtatcccaaagcagaaatcagtgtaggtagcattactaaacttagcaaataaaaatatgggatgccaag

SEQ ID NO: 122744 - DNA, 120 bp, synthetic construct
  source 1..120: mol_type = other DNA
atgttcctgtaaccagttgtaatatatgccaatctcaaagttaaattctggctctttaggagggagctttcatctgaagacctgggatcttcagattatcactgcgttgtcacttcccct

SEQ ID NO: 122745 - DNA, 120 bp, synthetic construct
  source 1..120: mol_type = other DNA
ataagtcagagcatgttagttatcctctgctcaaaagcctccaagagcttcccacattaataggaataaaagcccaagtcctataatggcctgcaaggtggtatctgatcagaccctctg

SEQ ID NO: 122746 - DNA, 120 bp, synthetic construct
  source 1..120: mol_type = other DNA
agtaaatcatatcaccaaaacacttctcattccaatgcttgatagttatggaatttgctgagaccacccactgaatacccgttcaaatgaatggaatctcacagagcacacataatcatc

SEQ ID NO: 122747 - DNA, 120 bp, synthetic construct
  source 1..120: mol_type = other DNA
atatccatgtcagcagttaggattatctctcttctttattttagttattctccttggtaaatagtagtagtatctcattgaggttttaatttgcatttctctgactacaaataagattga

SEQ ID NO: 122748 - DNA, 120 bp, synthetic construct
  source 1..120: mol_type = other DNA
gcagtgaggcaagattgtggcactgcactccagcctgggcgataagagcaaaacactgccaaaaaaaaaaagagagagagaaagaaagagagaaataaagaaagaaggaaggaaagaaaa

SEQ ID NO: 122749 - DNA, 120 bp, synthetic construct
  source 1..120: mol_type = other DNA
tgcaggacaccttcgaggtaacccaccagggaagttccaccatcctcccagccagggactcaggccctccgaggctgcctctgcccgccaagccttgacagatgagacctcctttacccc

SEQ ID NO: 122750 - DNA, 120 bp, synthetic construct
  source 1..120: mol_type = other DNA
tgtttgggttgtgggggtgaatccctaatgaatgactaactgctttcatcacaaaaatgagtgagttcttgctccgagttcatacaacatgtagttgtttaaaagagtctgggacctcct

SEQ ID NO: 122751 - DNA, 120 bp, synthetic construct
  source 1..120: mol_type = other DNA
ctggcatggcaatggtgctttaatgcatttctctgacaaaaaaaggcataaagtaggtatcagaatttttacttaaggataaggaggaggcacagtggctcacacctgtaatcctagcac

SEQ ID NO: 122752 - DNA, 120 bp, synthetic construct
  source 1..120: mol_type = other DNA
aggtgaatccctgaatagaccagtaagaagctgtgaaattgagacagtaattaatagtctaccacccaaaaaaagtccaggaccagactgattcagagctgaattccaccagagatagaa

SEQ ID NO: 122753 - DNA, 120 bp, synthetic construct
  source 1..120: mol_type = other DNA
ggtgattcttcaaggatctagaaccagaaataccatttgtcccagcaatcccattactgggcatatacccaaaggaatcataaatcattctactgtaaagatacaagcacacatatgttt

SEQ ID NO: 122754 - DNA, 120 bp, synthetic construct
  source 1..120: mol_type = other DNA
ttcatgcaaattgtgaccaaaaaagagcagaaatagctatattaatgtcagacaaaatagacttcaagacaaaatttttataaccaaaaggatattgtataatattaaaagggtcaatcc

SEQ ID NO: 122755 - DNA, 120 bp, synthetic construct
  source 1..120: mol_type = other DNA
catggtgaaaccccgtctctactaaaaaaatacaaaaaattagccgggcgtggtggcgggcgcctggagtcccagctacttcggaggctgatgcaggagaatggcgtgaacccaggagac

SEQ ID NO: 122756 - DNA, 120 bp, synthetic construct
  source 1..120: mol_type = other DNA
ttagttagaaaagtaacgtaggtccattgcttgggatagttgaagagggcaggaacgcaccccagaagcagaaagacatgcaggagtgtctgcttcttccccccagctctcgccccaggg

SEQ ID NO: 122757 - DNA, 120 bp, synthetic construct
  source 1..120: mol_type = other DNA
gtgggccacttatttaagtgggggcttccaaatttaagagttttcatatctttttagatgtttcagaaaatatgccaatctccggctaggaagtataaatctggctgccagcattcttag

SEQ ID NO: 122758 - DNA, 120 bp, synthetic construct
  source 1..120: mol_type = other DNA
aaaaattaaaaaaaaaaatgaagtatataattcaatggtttttcatatattcacagttatgtaaccatcaccacaatcaattttatattttattcaccccccccccaaaaaaagaaaccc

SEQ ID NO: 122759 - DNA, 120 bp, synthetic construct
  source 1..120: mol_type = other DNA
tttgattgaccctaacccacttattgggtgggaaggggcatgcagggaatgtgtgtgtgactcattgccccttcttttggggagtttgtatctgtgacactgacgctcatccatggaaag

SEQ ID NO: 122760 - DNA, 120 bp, synthetic construct
  source 1..120: mol_type = other DNA
acataaggtcagatggtgtttgatatttaggacttcgtaggaatccagagccagggactttagaagagctctgaaatgggatcattacctatgataaccagaaaactcaagtatagggtc

SEQ ID NO: 122761 - DNA, 120 bp, synthetic construct
  source 1..120: mol_type = other DNA
ccagcaagcttccccaaatgagctgtaacctggatcgtaatttcttcctagaaagtaagtcagcctgacagcataccaggtcagaaacaaatgcttaatattttaagtggaaatctgtgg

SEQ ID NO: 122762 - DNA, 120 bp, synthetic construct
  source 1..120: mol_type = other DNA
tttcctcttgctactgccctccatgcaaagtgctttctccaccctcctgctagctttttggtggaggaagcatggcttggatccagcatcctgcccacatgtttgaggattcattgaaga

SEQ ID NO: 122763 - DNA, 120 bp, synthetic construct
  source 1..120: mol_type = other DNA
gattttccatcagtcaaccagcatctgttgaggacttggtcccatgcaaagtaaatagacatctaagcaaagtcccagtggatgcttgagttgcagaatcttagagccttgtttctctat

SEQ ID NO: 122764 - DNA, 120 bp, synthetic construct
  source 1..120: mol_type = other DNA
aggaaagtgacagtggaacccagtttaacagtatcctaaccccgaactcaaggaccacgcaagggcagtcatttgttcctatccttgctgcccactgaatccagggcctatagctcgctg

SEQ ID NO: 122765 - DNA, 120 bp, synthetic construct
  source 1..120: mol_type = other DNA
agccgcgccgacccgctgcgatcagggacaggcgcccgcccgccgccgccgcctggccgctatggatctattcgactttttcagagactgggacttggagcagcagtggtaggtgttgat

SEQ ID NO: 122766 - DNA, 120 bp, synthetic construct
  source 1..120: mol_type = other DNA
agattcaaaggttgagtcagctcttcacaaaataccctaaacttgtcgctgagacattttgaaagatggtagaaaggtgactggggacctggaaagttgttaactctcttagagatgtgc

SEQ ID NO: 122767 - DNA, 120 bp, synthetic construct
  source 1..120: mol_type = other DNA
tttaaaaaaaatgataggctccctcacccctgtgggaggctttctttttcttatcttaaggaaaatgcaaaacctttttttcctccagatccctaactgagacacatcagttaagaagca

SEQ ID NO: 122768 - DNA, 120 bp, synthetic construct
  source 1..120: mol_type = other DNA
ccactggatttcacaaactgcaagaataacttaatgggtcatgctctggactcgattaaagggccaaagctcaagttctttaagattcttggatgaatgagcaatgttcacctgagtctg

SEQ ID NO: 122769 - DNA, 120 bp, synthetic construct
  source 1..120: mol_type = other DNA
actcactaaactgttatataaatagaaagttcaaaggtctgtgtggggctgtcaaggctgagaaggggccatgtgccggccaggcctctcctcctccggtaaaggcagcccccagggcct

SEQ ID NO: 122770 - DNA, 120 bp, synthetic construct
  source 1..120: mol_type = other DNA
tcaaggtagaaaatgactgcctggaaaatgagtccatcattatagacatgaatgagattccatacatttaagcatcctgtagatggatacaaattatattgtatttaaacatgctaatta
